United States Patent Application Publication US 2008/0274467 A1 - sequence listing, part 11

SEQ ID NO: 1480 - DNA, 523508 bp, Homo sapiens
  misc_feature (1)...(523508): n = A,T,C or G
ttttttttttttttttgagatggagttttgctcttgttgcccaggctggagtgtaatggtgcgatcttggctcactgcaaccaccgcctcccgggttcaagcgattctcctgcctcagcctcctgagcagctgagattacaggcatgcaccaccacatccagctgagtcacatttttttctgtgttcctacacacacacacacacacacacacacacaaatacaaatttacacatttatatatgtatatacacatttgtatctttgcttcttgtctgtcttttgtgagtttaattcacaggacctaagtgagtggaggaaaagtttttttctccttgacacctatcaaccatacttagccaacatagttatttgacacattcgtttactgcttcctttcctctctagggccattcctatttttgtacaaaaatacagttattttcccataaaaatttacttagatctcatcggccaccctcttttttcactcttctttgcaacagcattctgtagcctctgacttcaatttctccccttcccttctctctgaaactccctctaaacaagctttgacaacctccctcccactgacactgttctggctgggcacagtgtacatgcctgtagtatcagttactcagggggctgagatggaaggattgcttgagcccagaagtttgaggccagcctgagcagtgtggtgagacccccatgtcaaaacaaaagcaaaacaaacaaacaaaaagacactgttctatttattgtttatctctagcatctataacagtgcctgttataagtgctcagtttatgtttattaagttctgtttctgaatattttttatgttcttcctgtttgttagaattgcattttgtacagaaatttgaatgacatctgaatagattccaaggctttgggaagtatcaccattctagtactaaggctgtgataaccacagatacaatggcagattatacagtttgccaaataatattatgtgtgccttccaaagacccaggctgtcatcaccacattgaatcttgtgaaatagctctaagaggaggtggtcattctctgtcacttactgatttatctatatgaaccttgttagacacacgtcctgaggcaagttttgcttaaatctctgccctatgcctattgatgggagtttttactcccaccaatatggggggcctgcaacttaaactgacaaaagacaggtaacaggtgacaagataaatttgtattcatgcatgtacacagtcccacagtatttactccattactgtgtatagcataaagcatccaaattattattattattatttttgagatggagtctcgctctgtctcctagggtggagtgcagtggtgcaatctcggctcactgcaacctccgcctcccgggttcaagcaattctctgccttcgcctcccgagtagctgggattacaggtgcctgccaccatacctggctaatttttatgtattttcagtagagacgggtttcaccatcttggccaggctggtcttgaactcctgacatcgtgatccacccgtctcggcctcccaaagtgctgagattataggcgtgagccaccacgcctgaccaaaccatccaaattaaaacaggatcaatgttttgaagggagttacacatgtgttttttgttttgttttgttttgttttgttttttagacagggtccgcttcgttgtccaagctggagtggtggcacaatcttggcttactgcaacctctgcctccccagcttaagcgattctcctgtctcagcctcccgagtagctgggactacaggcacatgccaccatgcccagataatttttgtatttttagtggaggtgggggtttcaccatgttggccaggctggtcccaaactcctgacctcaaatgatctgcccaccttggcctcctaaagtgctgggattacaggcatgagccactgtgcccggctgctcatgtgtattaaatgatggctattggccaggcatggtggctcacgcctgtaatcccagcactttgggaggccgaggcgggcagatcacctgaggtcaggagtttgagaccagcctggccaacatggtgaaacctcatctctactaaaaatacacaaattagccgggcatggtggtgggtgcctgtaatcccagctactcgggaggctgaggcaggagaatcacttgaacccgggaggcggaggttgcagtgagccgagatcacacagctgcactccagcctgggtgatggagcgagactccatctcaaaaaaaaaaaaaaaaagatggctattatataaatgaatataagtgaacaaatgtgataagttaaattttgctaggatccctatcccatgccaatcaccaaagggaacacaaattatacaaaggtagggactatgttttgctcatgactgtgtcaatatataatatacaaataatatcttggtattctgggacttagcattcattgttgaaagagtggatgagaatcttggtaatgccagcattttctttctgctcagatgctgatcccactctaacctatcctgtttacaactaattcctagactttttatgatgcaaaattataaaacaaggatggaaggcttaccttaaagagagaagtggagggattttttgtcgaaagtcatatataataaagagtacaaaaaataataaaagagaggagagggcgtaaacactgatcttgctatgagtagaagaaggaacctattttggcgagggtaaataaagggacttatttatttaaagactcactattttttatatttttggtagagacggggcttacccatattgcccaggctggtctcgaactcctgacctcaaggaatccaccctccttggcctcccaaagtgctgggattacaggcatgagccaccacagcccagccataaggggacttcaggaagcctgctgagaatgtgggagatgagagtgaatgttaggaggaagaaagaagacgaaaggcggatcaaaacatctggctgggggttctaaattggattgggcatctaattgtttaatgtctttcaagggataagagaaataaatggcattcttttcattttaatttacttgcttttgcccattcgattatgctttttcttttcttttatttttttgagatggagtcttgctctgttgcccaggctggagtgcagtggtgcaatcctggctcactgcaagctctgcctcccgggttcatgacattctcctgcctcaacctcccaagtatctgggactacaggcgcctgccaccacactcagctaatttttttgtatttttagtagagacggggtttcaccatgttagccaggagggtctcaattactgactcgtgatccgcccgccttggcctcccaatctattgtactttttaaaatgagactcccctccaggctaaacctttctccttttgggctatagcagaaagacctgagctcctcagtgacagggagcgtatcgtctttattttgttttcctgggactagcagagtgtctgctacagagctgaagggtcatgtttcagtttttggaaagtaactcaacttcagcctcacatctactggacagagtgagcttatcttggccctccaggcaaagtcagctgaaggccatggtagagacacaactggttcttctactagtcttcttctagtttgcttattcgttttgctgtatttagctctttataaccttcaacaaattcaaggttttattgcggtataattgatttgcaataaactgcacatacttaaagtgtacaatttgatgagttttatatgtgcgtaattgtgaaaccaacagacagggaacatagcatcacctactggagtctcctcacggtggttttatttcaaggttttattatctagagataaagagataaggaaggagatagatcaaataggattcttcacgatttgataattgttgaagctgggtgacaaggattcaatgagattcattgtttgaaactttttatatatgtttcaaaaaattcatttataaaagtttttctttttttctttcttttttttttttagaaaaaacttcaggccaggtgcagtggctcacgcttgtaatcccagcactttgggaggccgaggcaggcagatcacgaggtcaggggatcgagaccatcctggctaacacggtgaaaccccgttctactaaaaatacaaaaaattagctgggcgtggtgggtggtgcctgtggtcccagctactcgggaggctgaggcaggagaatggcatgaacccgggaggcagagcttgcagtgagccgagatttcgccactgcactccagcctgggtgacacagtgagattccgtctcaaaaaaaaaaaaaaaagaaaaaacttcaatatgttaactcctattgatgatagaggccactggctcctgtttaaaaaattcaggaaatgtgcatggccggatacttctccccagcaaggtttggggaagcattatgaacgaacttaataccctctcccatgtcaattaaactagtcacgaatgaaaagatacggggattatttgggtgggtcctttagatccgaaattttctttttttttttttgggagatggagtctcgctctgttgcccagggtggagtgtggtggcacaatctcggctcactgcaacctccacctcctgggattaagcaattctcctgcctcagccccccaagtagctgggactacaggcgcatgctgccacgcccagctagttttttgtattttagtagagatagggtttcaccatgttgcccaggctggtcttgaactcctgaactcaggcaattcgcccacttcggcctcccaaagtgctaggattataggcatgagccaccgcgcccggcagatttgaaattttcaaagaattcaagcattatggctttggctaaaaagcaattcatttattatttatttagatatgaggtctcattctgtcacctaggctggagtgcagaggtacaatcttggctcctgtagcctcaatctcctaggctcaaggaattctcctgcctcagccctcctgagtagctgagactacaggcacatgctaccatgcctggctaattttttatgtattttttgtagacacggatctcattatattgtccagcctagtctcaaactcctgggctcaaatgatcctctcaccttggcctcccaaaatgctgggattataggcatgagccactgcatccagcccagatattttaaatgtatatttatatataatctttttaaaaacccatacatgctaacattctatgcacatttctgcattttgcattttcactcatacatctggaagatatttctatatcagtacatataattaaaaaaaaaaaaaatctcattttttaaacagctgcaaataattctagcaaatgaatgcataattgatctaactaatctcctgtggatagacatttaataattgtttgctactggagtcagtgctgcctttatacatatgccttcatgtacacgtgcgtttatatatgcaagatacatttatagaagtggaagtgctaggattacatttataaaatgtatcaaccttttaaaagtacatgcatcaaaatgtttgatacatttttaaatgacaattattgccaaattgctctgtatcatgtctgtgtgcgacaatttacaatcccgctaatgatgtatgaaaccatttgattctgtacacccttaatgaaacagtgtgttccttacactttttatgtgtgcccaactcttaggtcacagtggggtttcaatatgatcttaatttacatttatctttttatgagacatgttgagaattttatcataggaactatttgtatttccttttctgagaactatctgttcacgacatttgccattattttttcttgggcttgttattctttttgttcttgattaatatctggtgggatatttattcctactttttttttcatttggactgttgaattagcttgtttacttctaaaaaaattctactttcattgggctaagttacatttatggtttaattaagaaaaactgacatttcaatgtctcttcctgtatgagaacagggcatatctttccatttattcaagacaaagtgggtttaaacaggtacatttttaaaagatggctacttgtggagtccaaattgagaagggcaagaacgaaagcaggaagaccaattaagtggtcctgcagtggcccaggaaagagatgatagtgcttaggctagggttgggggtggatagatttgagatctgtcctggaggaagcaccaattaaactttctcatggattggatatgggagtaagaccaagggaagaataaggatgatgcctaggttttcaacttgagccattgagggactagtgatgctgtgagatacaggagacagaaagagatcctagaagaaggcttgcttagaagcaaagtccccaagcctcaaactccagggaggctgcccacagaagctctttcagtggagacacaaccaactggaatcaatcaactgtaatcacaaccaaccagggccttcattaacccatgtggtaccttggtgtgaatttaaaaatggtggcttttctgggaagacagaggcccaaaggtacacttggcaaggagtatgcgagttgagttttagcccctacttagtctcttgactgggagctcctgtgctatgagcaacctgcaggaccagacctggaagccttggaactaacctctgactggggcatctgactcatccactcctatacagtactaccctgctccttaaacttaccccaaaatggcccctgactctagtgttctgctactcaggtagatcctcacctctacctgtttagagatctgccagttacagtgaatctgactgctgcctgcttacgcatttcggcagttgccttgcctctcctaaaccttgaatatgttgcatagaataaaatataagccttaagtcatcttggttaccataaatctcagaatgatgctttttcgatacttatgcaattcctattgcccaatttgaaaatgtcctggttcatttgaaaacagtccagttagctgcatagagcagcaagctgtaaattgtatctgaaagaccgctggcttcaaaccattgggattctgagtcatctgtttggtggtctgactttgatcccagcctccagcctctgggtccccctggtctaggtgacacctctccaaacagtgttgagcttactcctcaaaggcagaggacagaagcggattctgaaaaactctgcgttcagtctgacattccctgttcttttcccgcaccttccccatgaaatagcagactcgaaaataaaatttactcatgccctcatgactgactgactacccccaacccagggggttctcccgtccttaatctcctccattttagttataccatggggacttcaggtaggctgcaggagtagatgctggcccacatttccatcagtccttgctagggacagtgttacactgcttggtaattgataaatccccactctgggtgcacagtcccctctccccaactgagctaagatgtgggctattgatgctttcatgcccagcccaaccatgaatcagttgacttccagtcaatcattcctcctcgtacccaccaggaacaacactaacaactgaggcaagaatgcaaagccacaacctaaaagaaaacagacacattgttccatctgatctactgacagctaagacagtcactccatggagtacacaggagattcgcaggctgctgccagggctcattctgttcttgtctttcctatgactttactcaggattccattatcagcaacttcaccctccagctctctccatcctcctatgaaagcctcagggacatagaaataagcttgtctttgtaaaatgtgccaggatctccgtcttagataaaagacgactatgagaaaagaaattatttcattccactatgttccatttgatttctgctttcaagcaataaaccaccatggcttgagatgcttctagtgtttcatggagaattgggactatttccccaacatgccctgctcttcattcctctttgcttcttccctttttgactccttggacccgaggggcgaccatgagtggcgaaatttctgaccagctagaataccaggcaggtgcaggctcttgaagcaccaagactggctcaagagattgtaaatggatcagtcaagtgcatgcaccactgacggccagtcaggagagcttccatttgttaaaaatataaaggacattcctatcatcaagcatcacaattaggcaatctcaaagaaaacaatattagctctacttggcctatgttacatgctctaagaaagtattttagaaaagttttttttttcaacataaatttattgaaggatcaaacgtgttctctttcttggtctctttagctcgtaaagtcgttttggggatttcgtgaatctggcaaataaaacaaaacaccaatgaaacgctgagaaatgattatttcccttatgtattttagcggcctccaggcagacctgataaatattcagcgagtgattagctggtgcatccccacctgcgtcctttgcatagccatgcccgctactctttcacaggcagttttacttggtaagttacaaacgtactggctgcactctgcacctgacagtattgcagtaattagcttgggatgcaaaatgatttctaaattaaggtcctggacttgtaaaatcaagaaagcctgataatcaacatcgtcgctctggtggccattgaataacgggataaatacctaagacaagtcctttaaccatcccacgtggtgataaatgcccgacgtacaaattaaaagtctctaccacacgcaggtgaaataaggtataggtcaagaagagaaggtaggggaaagggtcaatgcttaattatttaaaaatcgctctcttcctcctgtaggaaggtctaggggctaggtcttttagtgcacacgtgatgaaagtgacattttggccaggtgaaacctcaagctggtacaggcagctaaaacacgggcgtcgtgccctggagacaccgggggtcctgaggatggggaaggggctccctgctgcgggtgctgaggggttaggaggtgagcaccgggcgggaggctccggggcaggggctgcgcgtggagcccactcccggacgcgggctcctctcggcccggcacgggtggcgcaggactccgagcccgtcgacaagagagagagcgggagtgggagaaggaagaccgggagaggaggaggccgggcggcaagagcggaagaagaggaggagaactgaggcggaggagggcgagagggaggagagccgggcgcaggaaggggaggaaagaaaaaggcggcggaggagcgcggacccgccactcccggcctcctcccccgcatccccactcgggccggccctcccccggccgccgccgccgccgccgccgccgccgccgccgccgccgccgcctccccttgcccagtgttcccagcaccgcaaggcactcgctgcctcctccgcactcggtccggtccgctcagcgccgccgccgccgcaccctcgccgcacccccgcgcgcgcccggcccgcgcgcccccgccgctcgtcctcgcggcctcgcgctcggggcatgcgcggtgggcggtgccgctccgggccgcctctgccgccgcgagtaggaagcgcgagcgccgggcaccgggctgtcagtgagcctggggccagcgggcgagccagcggctccggctcccgctcccgctccgcgcagcaccagcccgactctccccggcccccgccgcgccccctcgccgcgacctcggccaccggcccgcgccccgcgcccggggtcgccccgagcccgcacctctcccccgccgcccccgcccacccggccctccgcggccgcagctccccggcggaggcaagaggtggttgggggggaccatggctgacgttttcccgggcaacgactccacggcgtctcaggacgtggccaaccgcttcgcccgcaaaggggcgctgaggcagaagaacgtgcacgaggtgaaggaccacaaattcatcgcgcgcttcttcaagcagcccaccttctgcagccactgcaccgacttcatctggtaggtgccgggccgggcactcctgccccgctcctccccgcctccgggtcccggcacccggcgctccggcgcgtccgccccggggctggctcactccgataacttggaaccggcgggagtccgaactcttcgcccggagtgacacgcgcgcccggccctgacaccggcgggcaggactcccgggacgtcgccgtcccgccacacacaccccctggcgcgagagggaggctggccccgtacggtggcgaaggggatccctctccgggccgggcccctcacctccccgggcgcgcccacccgcacgcacccagcggagcggccgcttgccggggtgtgagcccaggggacaggggaggaggagaggccctaagggggcaaaggttcccggagaaacgcgccccggagtaacgggggagcggcggcgattgcactgcgcgcggtccaagttgctggcgagccaggctgggcgcgttcggggtggggggggttgtgtttgtgcttcccatcgggctggactgcgctggcatcttgggcccctgcctactgtaggctgcatctactgggcacggagagactgacttttctgagtgagcagagagagagagagcaaactgttgaaagcttgcagtgggggagggggagttctagcaggcaaatggcacaagggcagagggactcatttaaaatagaccctgtcggccaggcgcggtggctcacgcctgtaatcccagcactttgggaggccgaggcaggcggatcacctaaggtcagcagttcgagaccagcctggcaaacatggtgaaaccccgtctactaaaaatacaaaattagccgggcgtggtggcacacgcctgtaatcccagctactcgggaggctgagacgggagactcgcttgaacccgggaggcggaggctgcagtgagccgagatcgggccactgcactccagcctgggtgagacagagcgagattccgtctcaaaaaaaatgaaatagaccctgtcaactcgagattagacctgtaaccctgttgatgagggcagaggccttatttaagaaaaataatataagggccagaggtcagagatcaggtaatcgccaatgaattcaggcattcttaactcggagggtccctgggggcttatggagaatcgatacatagaagggcttcaggggtctctgaaccctgtaaaactgagggaaattgtgtttgtgaatctttttcctggtgagagaattacagctttcatctgatcctcaaaaggtgtgtgacccttcttcccagatccccgtcaccacacaaaagttttgaaagctggaactaaaggaactctaggtcctctagttagagcagcagtagtttggtttttcttttaagttgcccgacgtcctgactcttctacctcttctttgtggtgtaggaagttccgggcaagacagagctatggctagggcttcttagctccctctccttctaggccagggggagctgcacagggtggcagtcacggagtgaatcctgccaccagccagctgtgtggcacaggtatcttgggccactagggtgaacatagtatggatggctctgtcggaatccatcacacctggggaaaaacatcccaaagggcaggtcccatgatcgtggtgcgaataaggtgtttaatttttcctttcctttttagacatctgctcccaagtacacttttatgaaaagcacagccacctctatgagtgatttccactgtctagtcggcatatgaagcgactgtgctcaaaggagtaggtagtcgtagataaggctatttaaaataaaaatttcggagcatcagggcaaagagaatattgcatttggttaagaggaggtggtcagctgtgagagtccattaaaagggaacagactgctggtgacttttgcaggaagtaggagagttagaaagggacttgcagcatactgaggctagctattgtctttccactatcagttgcccttgaaggatcagcccctggtgagctgaagaggcgctcaggtcaccaccagtattgtgaagtggaaaatgcccccctgaggatccctgcagcactctgcatttaattgtaaaccaaccaattggaagtcccaggaaaccatccacggggattgtctttttcagtttgctttcattattgcttctacggggtccttgatttacacgtttatttcaatattaaatcactgatatttttaagcgaaatgtttagagttagatatggtttttagtaggggggatgactctaagttaattttaaaagtatgtgaaatactttgtacatgaaacattctatgtgaagcaagagattatgactctcaaccttccgaagaaattttaatgcagttcattctggtagaacaatacctgcaattgaacgtccacgtcagggttctctgcttacagagtaaattctctaaagtcatgtacaagaacaaaatagcctccctatgtgctttgaatgctattggttctcagtagaaattagatcgtggtcatctcaaatgcaaacaataggaattatattttctaagatctggtttcttaagccaacattaaatgttaaaagtgatgccgtttggcagtttctagacatgtgatattttaaacaaaaagaagccactttgttatctttagggagataaaaacaattttcatttggtcttcaggaacaaaataagcaacttccttttacaattttaaccataaactgttttgttacttgaatattgtgttgtagccaacaagtttgaatatacagtcatgttcttgtcttgaaattttagtattgataacatagtataaaaaattggaaaaaaggttgatacatcgaaatagttcagtgatcctttataggcaagatttttttccccccaaggttgaatttacacagtaatctgactagatatttaggtatgtttttttctattaaatcattgggtttcacatacaaacctttagtggtagagtacttggtcacataacttgtttaaaatatgctatccaacagaaaatatgttaagatattttgttcttgtttttgtttttcagggggtttgggaaacaaggcttccagtgccaaggtaagctaccacttttggttttattttcaagcacaacatgaaataagcattccaaacaagaacattatttccagtcatattttctttccaataaaaaaatgttatttagataattttgaaatatgagggctgtaaatttgggccttaaaaaataattggggcctactaatctgcatatagagctgcctttttctcattggaaaaaaaaaaaaaaagcctttctgtaattttattttttgccgagaacattcttgtcagaaactgctgtctttgtgtgggtgttgagaaaaaaatggaatcactttgtattcaagtggcttttcttccttgttcttcctctttgtttttattcttcatcgcttttacttatgtattgagttggactcactgcaactaattttaggccgtatttcattctagtaagggtttgttttgtttagaataccagttgtcatcgagaacaaagtttgcatgttttaaagttttgttgatgatttgatgactgatttctatggtatgactatgtagcatgctttcctttcagcttacatatctgacaaaacgtgataccagccatcacatacagaaagaaatccatttgcttcaccctctgatctgtaattgcatttcacacacatcgaatatctaactttttgtactctccattctaattgtttgacttttcctttttgaagaaacccactttagagcttgtgaaggcatcacaggctcattagctaacttttctggctctcctgctcattgtctatattgtgtttatttagttctggttccatttcccatctgggcatagatttattattagggcaagcagaaagtacattctagcctggaaaatattatcctaacactgtttaatattaagtgcattagagagaaaggcactgtgtacttttttacaactttgagattgtgctagtaaattggttgccttttaaaaactagttcaaatttgtgaacttgtttcttgtatacattttctaaacatattttagatgggagtattttatggtatgattattcatttaatattctaccttcctttctccaagatgtgcttaaaacccctactgagtgtatcattttcagagttgcatttgaaaatcaagggatattccttttaaaaagagaagaaagagaaagatgtgttataccagtctctacaaaagatgaaaggaaaatgtagctctttctagttctcaaagttgtgggcctgaactttatgggtgagatttgagcctaggcttgaacatgactttagggagtttaaagatgtaaggttctgggccaatgtgattgacatctgttatttttggtgatatttttcgtttgggtggggacttacataaatctataagaaaatttttgtactgaatcttctccatactgcttgtctgggagaaagtggttgtcttgttctaaaacttttatcattttctgcataaataaaaaataaggttgattagaataaggttggttcctcttagacccgctcatctgagcagattttgtggaaatcacagtggtcgtattactaggctctagggggttttgcatgatttcccccagagcatctcttgaacttttagtggattagcagattaatagtttcatggcaacataactcccttttacctaaattaaaaaagtgaaacccataaaaattttaaactgtataaaataaaaagtgaaattgcatatgcttctcttttccctcctccagagataacttctgtttgagacaaccattcgttcactcactcacacatacttagtttttaaaaggagatcaaaattttatacgactttgcaacttgctcttttcactcagcagtagatggtggatattcttccacatcaaagcatcagttctgccttactctgcttagtggctgcatgtgtggatgtatccaatttattcacccattcctctatcaaggggtattttgtaattcgttcttactagtacaaatacctttgtcaagagcattattggacactagtataggtatttctacaatagatagccagaagtgtgtatgtgtgcatcttacattttaacgggtgctgctaaattgctcttcaagagttccagtgcacatttttttgtattaatgggacttcctcttcatttttaccagtgaagatatcgggtaatatacatcttttacattttttaccaatctggtaggtgaaaaggggcccctcttttagatttccatctcctgcattatgggtgagcttgaactttttttttcaaatgtgttttagccatttgtgttgtgtgaattgccttactctacctaatatttgaaactctggatttacaaaccagacaaattagagaagtgactatgtgctttctatatagttctttgctttggtgaagaatttaacctcagatctctttaaataatgaattaccctagtgcgtttacaaattacagttcacagagaccttttccaatagtatacatttatttgtaacatgctgtctgcttgttatattttgtttactgtgtctcatctgtatttgacttctagtaggcatatgctagtccattgtattttattgtttgttgtaacttaagaaggatatgttacctcagggtgatgcttttaatcccacaaatatagttacccagcattttctgttttggctcctaccgcaaaattaatctttctattaacatctgactatcgtagagtgaagttttcttttaatgctctctaattttgttttttttttcctcggttttgtttgatagaacatcattcttctgcaggagaataactcattctcattcatacctttggcaacacactctctggaaatgacagctggagtttgaaactgctttttgtattcctcatacatcagattatttttacccgatgaggcagtgctttctgtccactagtatgtagtatgttgctttggttagtaggtaaaatatctgcagcaagcatagtttttctttttttaactagaggggtgtgtatgctcccagtgactcacatattcatgcagtaagtaatatagctttagatccaaaatatttatcttcattttacttagtaaatggtgagtaggtatttgaagactaaagaaataagtgagttttagtccttaaaactgggtttgtaatttatgccatttagagaatggcatcttacaagcatgtgaagtactaaagttatttctactttcatttatgttgtatcttggggaagggaagggcgtttctctggagagacttattggcttattctcatgttcccttcatggactctgtgccattcttctttatattgcaatataggtatacaatcctgaaaactgatattaccagggcaagtaacacaggatcccgttgtcagaatttgctgcctgaaacggtgaaaccaagggccattcttctggggaggagaaagatgagtgtgtagtagatttccaagtgggaaatacttttcttaaggtcctcagagataaagacaagcgtgttccttcacagctctgaagtgaccctttttacatgacttggagttgccttcttatttttggttgaatgtttttttgcttgatgtacccctagcactcatttcatctccataaaactagcagagatctagtccttgcccactttttttttcccccgtcagagaaaggagaagaagacaggaagtagatttgtgtggtatggacattgatgaagttgagtttcaagtctggaaggtctgtttccagttggtagtttctgtcttgcactggctacttccaaagtcagtcatcagagaacagagcgatccactgtactgctcaaatgcactctttctctggggcagtggagctgaaacagtgttatccactgctttcagtactggaaaagggaaagagccaactcgatttttttccccctccttaggcggagcaacacccatgcacttctctaattacagtggtagaaacagcctctcaaaatgtgacctgcctatttcaaatgccaaacagttaacatagtttgtttcatctgcctaacctccacttgttttctctaatttttttttttttttgctattctttgtcttttaatatcacaaatgaaaatgtgctacaaacctaggctctttgatgaggtgaagatactcaagagacagcgtgagaattaagctctgtcagtaaccatgaccaacaggagcctgttgtccctgaatgatcgtcactggattttgaggggtctgctgggaaagaatttacatttttgtgctttcaatgatgctactaaagttgttttgaatcttgagtcatttccctgctaagaacataacacatattgtacttcatctgtgacttcaactgaagctctgcatttttcagtgttaagggttaaaaaatcagctactcttcccctttgatattttgttttgaaggcctgtttcagagaaggtatttgcattggctcatctgagcagggtggtgatttctattccttctgtaagaatgaaagttggtgtttaagggaagaaaaaaaagaatgagtctcctcttggctgtgtgagctgagggattccagaaaacaagactacttaaggaaggtggcctttaaacagaaagggggcagtagcgagtgagtcaccagcctttcagaaaagggatgcgccgttgtcctcatccgccacggtgttctgagagctgagttgtatggacaccaagtaccaggagataggagactgaggtacaagttggatggaatcatgaggtaggccagattgagcagaggatctgtctgtcctccctatggccaacttgagcagaggatctgtcctccctatgtactgcattgaccgctgcttgcactgtgtggcctctggctgcccgctggttttcaaagttagtgccagggttttccattattctgtcttcaggaggggttcagcccttggtacctcagttttgattggttacccatccccaaattgtaagttatgttaattagagataaactcttggaggtttagttccaaaaagatagaatgcatggaagactgagtataatttgaaacctagagtttttgtagtaatgccaggtcaaagcattatctcagtctcaaagatgaaatggtcagtaatgcctgaattacagagaaaagtggtggaggtggacagttagaactgcctttctgtggttgggtgcagtggctcatgcctgtcatcccagcactttggaaggttgaggcggtcgaattgcttgagcccagaactttaagaccagcccgggcaacatggcaaaaccccatcgctacaaaaaatagaaaaagtagctgggcatggtggtgcagcacccgtggtctcagctacttgggaagctgaggtgggaggatcacttgagcctgggaggtcgaggatgcaatgaggtgtgatcgtgccactgcattccagcctgggcgacagagtgagagcctgtctcaaaaaacaaaaccaaacaataacaaaaaatgctatttttcttttcaacagtgtttttcctccgtaaaactgcattaatacttagaagtagggatggttagataaaactagtgttgagtgttcccatttggtgctatatacttgttataaaatgatttctgattaatgactttctgaattgctactcttttactttatacggtaagtgaaagtgtttcgttaatttattcacacatcaatcctacccctgccaccagaagctggggttgtagcatatggagaggctatttatcctcataggtcgtgaaagccgaataaatgtttacttttgcagataaatctgatgtttgagtttccttttctttatattattttatttttttgagatggagtctcgctcttgtctcccaggctgcggtgcaatggtgcaactttggctcactgcaacctctgcctcctgggttcaagcaattcttctgcctcagcctcctgaatagctgggattacagatgcatgccaccatgcccagctaatttttgtagttttagtagagacggagtttcaccatattggccaggctggtcttgaactccagaccttaggtgatcctcctgtttcagcctcccaaagtgctgggattacaggcgtgggccactgcacccaaccagagtttccttttctttacattttttggtggtttcctgccctccgagtatttcactctcctggatgatactatcgaaatttaagtttttagacacattaactcctcacttgctcaattgtttttcttcatgcagattcagagtattccatttccaaatagcattagtttcacagctgccctatcaggataagtccaactccttagcaagacattggaagactcttaaagtctcctgcctgacctcttcagacttacctacaatgctttccttcttcctatccctgggtcattgtgaataagttgcagtttcccagaaagtgcttgtttcaattctttcctcaaccccctttgcccagatgatatctgtttcacctgttaagtcttagtctaaggtttagctctggtctttcccaattgtcctattctacatgttcttcctatcgtaggaccttttttttttttttttttttgtgagacagagtgtcactctgtcacccaggctggagtgtgcagtggcacagtctcacttcactgcaacctttgcctcctgggctcaagaaattctcatgccttagcctcctgagtagccgggattacaggcacataccatgacacccagctgatttttgtatttttagtagagacggggtgtcgccatgttggtcaggctagtctcgaactcctgacctcaagtgatctgcctgcctcggcatcccaaagtgctgggattacaggcgtgagctcccgcgccccacccttcctatcataggaccttcacactgtatcacctctctacttctgtttcctctgccagttttgagtgcgaggactgagtcttatttctttttgtgtctccagtgtgtaatgtggtgcctgacactcagtagatactatgtaaatatttgttgggtgtgtgattatataaatattaagagatgtgatacaagcattcataaccagaaagatcacagtgacttctgcctggctgccttttctatatttttttaaagcaagtttataatccaaagttgtgccaactaagatcttaggatcattaaagaaaaagtacttttaaagctaagcatacttattcaaaagagggagcagaaaattctacctttatgtatataataagttaacatatgtaatggctaaacctaacacattaacactgcagaaataaaccacttaatgtgtcttctttctatctttagaatattatccaagcatcaagaataaatcttattgcacaaataaaacaagagtgtatcatgggctatagcaggagggggaaaatgtcttgggtatagggtgagaaagtaaaaccagcttttagtacttgtttggtacagttatttaaatgctctattttactttgagattggtaataactggagctcaatcatcatgctccagagggagtagtagctcaacttcactgattctgttatttttaaaatttttgtacctgaaaggtttttgtgcgttaatacattttttgtgccttaatacaaataataaaggtttttgtgctttaatatgcaagtaaatgtacaggaatggcagcggcagctttggagtgaaacagctgtgattatgtttatcatcacagattataacggtgattagaatcactttcaagattttattcaattgaaaggaaagaaaatggatatgtattcaatgctacattatgtcagacatctagctttcatattttatatgctttcattccaaaagcaccccataacaggatgttatccccatcttagaaatagagctaaagtacttaaccaggctggtggggcgtgtcatgggttcagattctaacggttctgcagaaaacattcttcagagccaagtggaaacttttggtatgaatgaagcccggatttatattaggagaggaaagaatgatgccattatgaaacatttcttggtgacataaaattaaggtttcactgtcctcatcagtctgtcaaaatttccacggcagaccctttatttcaggtcttgttttccacccaaactgtgaaatctcatgctaaacttaaggcgtggccacttcagtgttggctgtgtctagtagaaattgctataactgcattaaaaaaactctttattaaattatacaaaagggaaaatggtttctggaaatagatttctatcaaggatggaatggaagggaatgatttgattaatggccagcacgagataagaattatttgagagcaagtccatcaagtaagattagcgtaagggcagttcatctttaatgccttctcttgctgttccccctccagtatccatgagcaatagtagatccatctgtcccgtccacggtgactgcagtaggtagttaggaaataaaccataaggatgtaaatatgagacatgagtttagctctgacttggacaagcttcctcaagtttgaggggatgggtcaatgagggtccagttaacagttgaattgagagtaaaattctactgtagagattaactcatggttttaccatcaggaaaactggtagttttgagtnnnnnnnnnnnnnnnnnnnnnnnnnnnnnnnnnnnnnnnnnnnnnnnnnnnnnnnnnnnnnnnnnnnnnnnnnnnnnnnnnnnnnnnnnnnnnnnnnnnnnnnnnnnnnnnnnnnnnnnnnnnnnnnnnnnnnnnnnnnnnnnnnnnnnnnnnnnnnnnnnnnnnnnnnnnnnnnnnnnnnnnnnnnnnnnnnnnnnnnnnnnnnnnnnnnnnnnnnnnnnnnnnnnnnnnnnnnnnnnnnnnnnnnnnnnnnnnnnnnnnnnnnnnnnnnnnnnnnnnnnnnnnnnnnnnnnnnnnnnnnnnnnnnnnnnnnnnnnnnnnnnnnnnnnnnnnnnnnnnnnnnnnnnnnnnnnnnnnnnnnnnnnnnnnnnnnnnnnnnnngttttcttatacttgaaacactacaactgatagccgcacccatatagcacttactgtatacactgttctaagcactcacttttaactcacttgatcctcacacaattctgaagagataggcagtgttgtgattcccgttttacagatgaggaaacaggcactgaggcacagggaggtttagtaacttgtccacagccacatagttagaaaatggtggggctgggattcagacctgggcagtatgagtccagatgccatgctgttaagccaggtgttctgctgcctctcacaattctccttttcttgaagttttgtcacacttaaatcacaccattaacttgaatgtcgaggtattaaagaatgaagtgttttttcttttttttttttttctgagacggagtcttgctgtgttgcccaggctggagtgcagtagtgcgatctcaactcactgcaacctccgtctcctgggttcaagcaattctcctgtctcagcctcccgagtagctgggattacaagcatgtgccatgatgcccggctaatttttgtattcttagtagagatggggtttcactgtgttggccaggccggtgttgaactcctgacctcaggtgatccgcctgcctcggcctcccaaagtgctgggattacaggcatgagccaccacgtccagccggaagtgttttttcaattcagtagcacttaatgtgcttcctgcctgtagtgggagcttatggcctgatacatggacctctgtttagtctatgtcatgccagaccctgcagggcgcgggacagaagacatatatgaaaacaacacattgtaacaatacatctatcacgtacattatattacatcttagtctgaatgaaataacagtttttgaagcatgtgggaaggaaggagatattttttgagctcatcaggagatggctcttgttttgggctttgtaggttgctagaatttcctttgattaggaaaatggaggaagctcttctaaggtaagggaatggcatgcgtgagagagggatgagagtgactcacgttccaggagtagtagactgagagagcccatcttatttgggatgttgcccccactgacctccaaatggaagaacagataggaaaaatatgtagggagctacttcatgctttgccacatactgattctttattaaatacatggtttcctcttgtatctttttgttttcatgtcatcattttcagaacaaagttacaaatacagagattactgtatctacatgtagaagatacattgtactgaagcttggaaaataacttcttgtgtttaaaataagcttgttcaaccggtgggccgcatgcagcccaggatggcttagaatgtggcccaacacaaacttgaaaactttcttaaaaaattatgaatttttaaatttttatttatttatttgttttaaaagtttatcagctatcattagtgttagtgtattttacatgtggcccaagacagttcttccagtgtggcccagggaagccaaaagattggacacccctggtttaaaaagtgtgctactttgacacttctttctgctgatctctctactataaggaagctggcaatagtgattattgattatatatagcatcatgttgggagtccagggtcttaccgcatggaaattatgactggagatgagatactcagttatactagatacatgtattaataagggaaaaataaagaactaaaatatttacatattaaaaatcagcagccgggcgtggtggctcacgcctgtaatcccagcactttgggaggccaaggcaggcagatcatgaggtcaggagatcgagaccatcctggctaacacggtgaaaccccgtctctactaaaaatacaaaaaattagctgggcgcggtggcgggcgcctgtagtcccagctactcgggaggctgaggcaggagaatggcgtgaacccggaaagcggagcttgtagtgagcggagatcacgccactgcactccagcctgggtgacagagtgagactctgtctcaaaaaaaaaaaaaaaaatcagtaacactttctattttagaaactgtcaactgatgtattcagtcagaatttctggttcatgatccgtagtttattccttctctctccatgggctaacctcgggctgatgtgttttcaccgtggtcagaaaccttggtaaggaaaggaaaggggtgctgcagtgtannnnnnnnnnnnnnnnnnnnaaagggcaaaaaaaaaacgccaaaaatttaccaaaaaaaaatccgcccccggggggggggggcccccccggtaatcccccccctttgggaggccaaggcaggcagatcaggagggccggggatccagccccccctggggaacccggggaaaccccgtttttcctaaaaaaaccaaaaattaactggggccggtggcgggggcctgtagtcccaactactcgggaggctgaggcaggaaaaaggggtgaaccccgaaaacggagcttgtagtgaacggagatcacgcccctgcactccagcctgggtgacagagtgagactctgtctcaaaaaaaaaaaaaaaaatcagtaacactttctattttagaaactgtcaactgatgtattcagtcagaatttctggttcatgatccgtagtttattccttctctctccatgggctaacctcgggctgatgtgttttcaccgtggtcagaaaccttggtaaggaaaggaaaggggtgctgcagtgtactggtatcctagtttggagtattagttttcatctgggattgagatttgagaaatacaagtttacatgatactgctaccatgctactgtgaacttacagtgtactaccaccccatgggtggaaaggatgctggaacagaagctaagtaggctgcccttgtgtgtgactggtgaattgggaagctgtaatttgaaattggggagatttagtgaatgtcttatgtttccattgcagtcgtttttttagttgctgaagctgtacagataagtagccaatccctttttctcaacttatctcttcatttttttccttctcttaggtttctaataaggaatgatttgtggtgctgtttgtgataattggaataaaactctcactggtttagaaagcttggctcacagttgtaaagacttccattagcttccattcagatttatgttgaagttaaatggctgtacactagcttaaatcattttcctccttttgttgaattcatgcatgcaactatacatcctaagtgaatgaactgtcctaaaatgtgaaaatgggagattactcattttttaaaaatgtaaaatattttaacttgattcttaagtatttacaatgtagaaaatagcttaaaacatgactgttaagttctaaatatgaagatgtttttcttaatgctgttatagttgggaaaagttgtacatggatgacttaaaatttaataggtgggcttcaaaataagatgatcatattatgagtaatttgcctaacaatacttctgaagttttctttttagtgaacttaattttatcatgtgccaaatttgtttaatactgaagtgacttttgttgctttagtttcacattagtttcttcaatctgaatggcacattaatatggaaaacttctctagaattctgttttaattaaaaaatgaggctttgtttctgtatatcacatagatgtgactttaaaatggaaatgatcgttaattacaaacagtttagaaacatggaggaatgatttttttttaatttttaggtgctaattcaagtttagggataatggctgataggcaccattatccttttttttttcttttttacttattttgtacaactaggcaccatagcacatgctggtattgagctggattgatgtctgtgtgatgcaaattaactttcaagtcatattttataaagctgagttgtcgggctggagcgggaatagttggtatgcttaagacttgtcatggtgggttgggcgtggtggctcacgcctataatcccagcactttgggaggccgaggtgggcagattgcttgaggtcggtagtttgagactagcctggccaatgcagtgaaaccttgtctccactaaaaatacaaaaattagccaggcgtggtggcgggtgcctgtaatcccagttacttgggaggctgaggcaggagaattgcttgaacccgggaggcagaggttgcagtgagccaagatcacgccactgtactccagcctgggtaacagagcaagactcggtctcaaaaaaaaaaagacttgccgtggtggctggcctaagtaggcagattgcttgaattcatgaattttagaccagcctgggtaacacggcaaaaacctgtctctacaaaaaaatattttttgtaataaaattacaaaattaggctaatttttattagcctatagtcccagctactttggaagtgggaagattgcttgagcccggtggttgaggctgcagtgagccgagattgtgcagctgcactttagcctaagtgacagagtgagaccctgtcccctccacccccacccaaaaaaaggcttgcaatggtggtctgccatggtggtctgccatgaatctaatgaaatgttgtggaaggataatttagaggctctgggcttttttgtttaattttctcagtaatatgacaattgaagtatattgctaatgcttttctagatgttatatgttttatttaaagtaaactctggaaaatagaaagcatttgtgattttaattttgacagtatcgtttgtgcacaagttgtttttggctgacttacccgttggtgaagaattattaaaggtcaaagttttatctcgaaattatgaagcacgttactaactttggcttctgttgtatttccagtgtgttcctttttgtcaggttatattttatattctaggtattttatcctgatagcctgatactttttcttatatggagactttttcttagcatgaaaaaaaaatttttttaagtagaatgtatttcatgtcagatgagcaaaactttttgtcactaagaagtaactgggtatctcttacatgacattgggttttaatattactaaaattatatattcataggtggtagtcatgcaataacctgaattcatatacttcttttttttttaaattttttatttgagacagagtcttgctctgtcgctcaaggtggggtacagtggtgtgatcttggctcactgtaacctccgcctactgggttcaagggattctcctgcctcagcctcctaagtagctgggattacaggcgcctgccaccacacctgactaatttttttgtatttttagtagagacagggtttcgccatgttggccaggctggtcttgaacacctgacctcaagtgatctgccacacttcagcctcccaaagtggtgggattacaggtgtgagccactccacctgcctcttaattcatatacatttaaatactgacctttgttgaccttcttggtgaatcctgttgtcatagggtcaggaaaagccctgttgttagaattttagagtaagaaaggaccgtagaggctgtctagcccaggttcttgaatttatacctgtagaactggctataagagttaagtgacttgctgtaaaccaaacccccagagagtggccacttaagtctccagcccctacctcctataggatgaccctgtgctatgaacctttgtacttgtactctgtagtcttgactctcaaatgccattcccagtgagtacaagtgcccatccaatactctattttttttttttttaaaaagaaagcatgagggaatctgcaaacaaagcagacgtgagattccttttattttctttgaaaaacggcagtgccttttagagtcaaatatgcatctaaactctaggagttttaccaggtaaataaggattgtatatttagctttcataatttataggtgaacagtctagtaacaacataaagaactcgtattaaagaatattaaaaatgcttcagacttttgatttgtattggatgagaattcatgggcaaggaagatgaccgttcacgaaattgtatattttttctctctaattttaactctgtgattctctggcaacaggctatacagttctggtgttacttagtctgcaaaaatcttacattgttttcataccagagctgattttgcctttttatatattacctaaaatacacacatacaaataaattactcattagttaatctacaaatgtacatatttttagtagctccctaaacaagatttaaagcttgactaaatgtagtcatggagcttattatttggtagttttgcattctgtagtttatgtaactctatccttaaaattgaaattatttctgagtggtacaagccaaatacagaagtcaaagctttatttttgatagtttcagtgttgttgatttgaggttctgaccttggaaataaagatacagaaaataaacacacaaaatatacaaaataacaatggacatttatgtatgcttttttcaatgtttattttctagctaaatccaagcacaacctaaaagtcttataaatattccatggaaaattttccttcctatgctaggtttctgagttgctttaaaaattagtctgaaacaatggttactttttttctccttggtaaatttccctgggggagtctcttggacattctttattgccctgagtctttgaaccatattcagaatgagaaactgaagacagttggtctgaagatactcggaggatggacagaaatgaccacagctgatttgatatgtatgaataattttgaaaaattttgatagaactcaagtgccaaggacagtttccatgtcgccttctttattgttcctttgtgcctgctatatggatgttattgtcttttttgaataatggcctcccttttcaaataatttagctcactttttaaaaattttttttagacagccttgctctgtcgtctatgctggagtgcaatggcatgatctctgctcactacaacctctgcctcctgggttcaagcgattctcctgcgtcagcctcccaagtagctgggattacaggcatgcaccactgcacttggctaatttttgtatttttagtagagacagggttttgccatcttggccaggctgatctcgaactcctgacctcgggtgatccacccgcctcagcctcccaaagtgctgggattacagggtgttagctaacttgtcttaaaaaaatctttgatagttcccagaatgaagggctgaggggacttgtatttgttccatgaactcagactcatgctatccacatcctgaagtgatcaaaccatccttggctctaacaactggagttctttctcatcattacccttctgaaatctttagaagaaataggtttctttgctccaaactttttaaacttttagttgctttggagtaatgtcactctgggtgaggtcagccttgtcagggtggttgctgagtgcatttatattggttctcattggcagtaatctcatttacaagcatagttaatagaaatggaaggccaaagatcttatgtcattgcctggtctcttaggagagatgaaataggaattcatggagcctcagagatctggaaaagcatcttcctgtagactaacactgtcctgtagaattttgtgtgatcatggagtgttccctaatctgcactgtctagtatggtagccacttgcaccatctggctattaagcacttaaaatgtagaatgaatttttaatttaattcattaaagttaaatggctacatgtagctaatggctactgtattggaagattcaaatttagactatttttaagaaaataaaattctttaaattttttaaagagatggagtctccctctgtcatccaggctagagtgcagtggtacaatcctagctcactgcagcctccaactcctagcctcaagaaaccctcccaccttagccacccaagtagctaggaccacaggcagctctcaccgtgcccagctaatttttaattgtttttttttttttttgtagagatggggtcttgctatgttgtccaggttggcctccagctcctgacctcaagcaatcctgtctcggcatcccacagtagtgggattataggcatgagccactgcacctggctagctttggagtattcttagggagtaacattggatcatattttttaaacctgaatttcattgtaaaataaaacacatacagaaaaccatgcaaaacaaatgcatagtttaatgaattatatgtcaacattcctgtaaccactgcccaaggctaagtagtaaaacttgaccagtcctccatgtgcctcatccctcccaccaaagtaatcactattatgacttttagattcatggcttcctcatgctttttagttttatcacccaagtgataaaacttatccttaggcactatagtttgatcttgcatatttcaaaataattgcaaatgtccttaaatcttttttaaatgatcacttcctcctccatctcctccttttccttataatttatctgggggagtacctgacttcttttgacctgtggagttttccacaatcagaattttgctaattgcatgctcccagtgcacgttaccacattcctttgtattttctgcaaattggcagcttgatccagaggttcaaatgatcagactcaggttgatctgggttatttagtttttaagatgcctttataacttcacatgcttgttaattatgggtctgttattgtggaaagaacaccaatggaatgttttctatcaaggtgtccaaaattgagagcagttagtatgataaaatggtttatgttaaattttgctgtatctaaaatgcaacactgagacatctactgagtgctacttgtggaaaatcagattgtcagaggtttctctaaatgtatttaatatgttcattggacctctatgcagattgagtttttatcaactgcttctgtgggcaagaagtgtgtatgggtatgtctgctggagtggtagaaagaattgctaatcagatgggcacggtggctcatgcctgtaatcccagcactttgggagtccgaggcgggtggatcacctgaggccaggagttcgagaccagcctggccaacatggtgaaaccccatctctaccctaaattcaaaaattagctgggtgtggtggcacattcctgtaatcccagctactgtggaggctgagacagaatggcttgaatctggtaggtaggtggaggttgcagtgagctgagatcacaccactgcactccagcctgggcaacacagcaagattctgactcaaaaaaaaattgctaatcaaatcgttatagccatttacttgtctaaacttcacccacatgactgtacataccatcttttttttttcctggtcttttaatttccaacacaagattaaaattgggttttagttatttttgtgcactggaacatctggtggcaaagaaagcaggaggtgaattgggtgtgttcctgtttgaagaagcagatggtcaataacacttggacctgctgtgtatagaacttcacataaacattgatatggagaaagagttttcataaaaattagcctctttactcttatcagggagtttaaaatataactagataaatatgacttagatacacaaaatactaagggtgcttttatgaagaaatataggcaggcatcagtggctcacgcctgtaatcccagcactttgggaggctgaggcaggcagatcatctgaggtcaggagttcgaggccaacctggccaacatggtgaaaccctgtctctactaaaaatacaaaaaaaaaaaaaaaaaaagctgggcatggtggtgtgtgcctgtaatcccagctatttgggaagctgaggcaagagaattgcttgaacctgggaggcagaggttgcagtgagctgggattgtgccactgcactctcgcctgggcaacagagtgggactctgtcttaacaaaaaaagtcaacatttataagttaatatataaaaaaaatttgagagactttccaatgtgataaaaaaagcagtagactggaaattaggtaatcttgatttgtctccagtttaggcctttgtcctcatctgtgtaaatgagggaattagactctagtagggatagcaaacatatgacattcttgccagatactatggcagataacactcattagtcacggtcttcattcagcttcagaattcttctcaaatttagggctccagtggccattacatattggttgattggaactgacatgggagacaacaatttgccattcctaggctacatcctttccaagtcccttcctagctacagatctcctctgtgaataaagaaaaatccttggaagctctaaattaccctgctagtcagtgtttctataacatatttcccccacttcttttaattcttccctggaagtgcagcatctcagaaaaacaactatgccagtaaaaatttttcctaaaaatgttatccattgaaatattgaacatttcatccaaagcaaaccattggtcattgtggattggccttaggccagaattgagttggtttagaatgggttggggagtgggggaagccaacaatcctttttatcccttgatgttatttttctttattagcagcatgtaaaatgttaaatttttctaatttttgttgggcccaagccgatgtttattacattcaatttatgggaactctttgcagttgaaatttggtatttgagtcacgtattgctttcatggtcttttacagagctctgtgacccaagtagtcactctgttgcctcccgccccactttaaaaaaaaatctggacaggaaataacaaaatactaggagtagacttgtgtttgaccttataggaaccataattaagggtgaaatagtgggatcctcaccccagcaatgcttgatgatagtaggggtagagtgtcctattcataaatccacaggagagaaagtcatgttggaaacagcaagtcaggaggctaatgttcctaaaaaccctttgagaacagggtgtagagaagagagaaaaagccctaaggggcgggtggttgtgatttattgaaagcttactccgaatcctttgagctacctagagagccctaggattactttgagtttataggactgcaagcttttgcatgcacaactcctatttttgaaaatttgacctttaaaatgatttcctttcctgtctcccatccctctccacctttcccccttttaaaactggccttttgtgtaaagttttaggttttagggttgatgtgaaggccctaagacctccatctatgagtggctaccatccattcacacacctaaaaattatttagcaggtaccgtactagttactaggaataaccggaggacctaccatttgttgagaaccccctttgtgtatggcccactgttaggcactttatgtagatatcttttctcatttaatcttcactaaatgaggacagattattttctggatgtaactcagatttaagtgttgctcaaatcacactacgtgactgggttagtgtttgaatgtagagcttcatactcgttcattttgttttttctcatgacatggatttttgtgacatttcataaaaaaaggtttttgaaaggtaatttctccgtgggtttgcatatctttaaaagcaaatgttgtcttccctgccctctgccctcactcacccgtaataaattgtaaaaatctgtctgtaagagcatgctctttaatttcctgtcttatatcctggtggtatgtgatgatataaaacaagtgtggctgagcctggcaaatttataagattgagaaggtttcaaagatgcatgaaaatgggtttacgtataatcaaaggttaattcaactctaacactttacttttgaggagcatcctcttttttgtatccctacctggggatgagagctgctaggagcgcagacaactcagtaattgtgtgcctgcctcatgcctagtctgttcatccttttgagctgtcaagatcaattatgttgaacatagccagagtggggtgtagtctgggtacagactcagcttttcttggcattggcagtatgtgacttctgtatctgatgtgtccatccaattcatattttggaatttacttagatatgcctcttattcatcagtatttgaaaattcttgataatctaaagtttgatccaggggagatttgctgaaagtgacatcaaacagtacctttgttttacttttaataatggattcatgtaaaaatcaccaggcatggtggcagacacctatagttccagctactcaggaggccaagatggggggaatcacttgagccctggagttgaaggctatagtgagctatgatcataccactgcactccagcctgagtgaccaagtgataccctgtctcttaataataattaaataataggccaggcgtggtggctcacgcctgtaatctcagcactttgggaggcagaggcgggcagatcatgaggtcaggagagaccatcctggctaacatggtgaaaccccgtctctactaaaaaatacaaaaaattagctgagtgtggtggtgggcgcctgtagtcccagctacttgggaggctgaggcaggagaatggcgtgaacccaggaggcggagcttgcagtgaggtgagatcgagccactgcactccagcctggatgacagagtgaaactctgtctcaaaaaaaaaaaaaaaaaaaaattgctgggtgtggtggtgtgtgcctgtaattcaagctactggggagactgaggcacgagaatcactggaacccgggaggtggaggttgcagtgagccgagatcgcgcccctgtactccagcctgggcgacacagtgagactgtctcaaaaataaaataaaatttctggatgtttctatcgtcatgtgctcccgtaaccgccagctatctgacatcaactctgtaaacttcatgtcctgtgtctccttcgtccacatgacttacatttttttatttcaattcatcttttctgctctcatctctatttctcatctttttgaaatttgtagtcatcagatagcttttatttgagtattaatatgacaagtttagaggagaattatttcacagaatgaggtctgaaattttaggtgactattcaacagattttttttccctaagcattcatcgtcatatctgccagccacggtgcctgatgctggagatacaagtgagcaaagctgagactacctctgctggaatccctctagtgatggacccagccactaatctgaaaatcatgtggacaagtaacaaaagactgcatatggagttaccaaggaaagcaccacgggattttggcagtgtgtaacaggggacctaacttagtctgaaggatcaggaacgtctctcctgagaagataacatttttccctctgttgcccaggtaagagtcagtggtgattgtagctcactgcaatctcaatctcctgggctcggtcctcctgcctcagcctccagagtagctgggtgttaacagatgcatgcccctatgcctggctattaaaagacaattttttttgttttggtagagacggggtctcgctatgttgtccaggtcggtcttgaactcctggccggtcttgaactcctggcctcaagctatgatcctcctaccttggcctcccaaagtgttgggattacaggcatgagccaccatacccagctggaaataatatttgaatgaactctaaaggaggaaaggagttaactgattgaaaatgaaaggaaaacccttctaggtaaagcagccagcaactgcaaaggccctaaaaggggaacattgtgtgttctagaaactgaaggcagaggctgggtgcggtggctcatgcctgtaatcccagcactttgggaggctgaaatgggcagatcacttgaggtcaggagtttgagaccagcctggccaacatggggaaaccctgtctctactaaaaatatgaaaattagccaggcatggtggcacgtgcctgtaatcccagctacttggcaggatgaggcaggagaatcttttgaatctgggaggcggaggttgcaatgagctgagatggtgccactgcactgtagcctgggtgacagagccggactccgtctcaaaacaaacaaacgaaaactgaaggcagatctcatttgctggagtgttttgaatgaggattattatggtgagaagaggctggagaggtaggcaggagccaccttgcaggtcttagtccatttaatccgtgttaaaaattcagtgctttagcccaagaaccatggcagtctttcaaagggctttaagcaaggaggtggcctgattagtgtctccttgtgtaggaggatcatgcctactgttatgtgaagaactaactagaagtgggcaagaatggatggggcagcctgttgggaggtctttcctcattctggtgagagacttggttccagaaaccagagatgtggtggaggacaaacgtttgcaaatccaggatcctttttaggaggagagatcagctggacatgatttggaggtagaagggagaggagggtatcaaaggtcagaggactgtggtgccattcactattacgtagcatgctagaggaagaccaggtttcggggaagaccatgtggttttaaacttgctgaatgagaagtgccttagaggtctccaagtgtatggtacagggactggggcagagggtgatgccgggaaggcagctggatttaggtgctggagctgagagaggcagccaggactggagagtcatctgcttacaagttaagttgaatgaatggcaaggatttgagtgcctggaagaaggcacagagagaaaagatgagagggctgatggaatcagtatagtttagtcatctacggagatgggaatgaacaagagagggcagggtttgcccagagaggcaggaacaaaaccaggagctgtggtgttaggaaagccaagagaagagagaattttaagcaggaggtccctactgccataggtaggacaaggtttcaagacaggagctgctctgatggcctgtggaggttggagcttcatcgtaatgggcagagtaaaggaaatacctctgcagccatctgagcagtaattccctggagagttaccaaggattgttcagtcaaacacaccccgtcatttatctggatagttctatttttccatacattgtctttgatcgaaatgtcgatcttttttcaaccagccgggatgaaaatggtgtgaatcgtgttctctctctttagaaagaaactgataaaattgggttttctttgttcttccttttattttcatccattcaatacctagtcctcactgagctggtcttactcaacccattccctctgctggtctgttgggtactaataacagatggaaacaactgggaagataaactattttcctggattttttttttttttttttaaacagagtttcactcttgtttcccaggctggagtacagtggcacgatctcggctcactgcaacctccacttcctgcattcaagagattctcctgccttagcctcccaactagctgggattacaggtgcccgccaccacacccagttaattttttgtagttttagtagagatggggtttcgccatctcggctaggttggtctcgagctcctgacctcaggtgatccccctgcctctgcctcccaaagtgctgggattacaggcgtgagccatcgcacctggcccctggagataatattgatatgtgactcagggaggtaccaaacccaactgttgccccctttcctttatttacttatccaggatatttatctatatctgtaaaaggatttattattttttagaatcgtacagctgtaatgtctattcatcctgtcagaagagataaagcggatcagtaggcaagcatttgttgctgcttgagagagattttattaagctaaaatattccattagactcaactccattttcaaatattttgttaagagggtctcaggatgactgtaggaaaaaggtatttggaagattgtgtacactgacaataactagattacaaaattttataaattagttaagatggactttaaaatagcaacaggaaaaacaattttggacttgtctgcgagtgcgagtgaagctgatagtaatgagatttatgggttctggccctgcagggatcccagtagggatgaataaagcacatgcctgctagtacattcactgattctgctcttggatatattatttacttctttcctcttttagtaagactttcatctgtattagtaattgttctatacttttaatctctggagcaactccataaattaacaaggggttgtgtctaagatgatgctgatagccctgaagatgttttatttagtgcttttgggatgatgtgcagagatgggatgtcagaaggaataatttggaatcttatctccctgctccttggactcatgttatcaggggaagggagcttggggatgtggctgtcttagctgtgtcctctgatggcctcatctcagtggtttgggttgaaagactgtatctcgtgcttcctgtcccatcaacctctcccttcgtctgtttttctcttctgtgcttaagtataaacagaacccctttgtacctctcatctctttatcttctgaagactctgatgtggctactatgctctcccatttggttaatgctactttaggtatttagtatctttatacttttgttgtgttagttgtgatcagcaaagttctatgctgtagcaacacattaatctgcagatctcagtggcttaacactacagaggtctacttctcccttgctgttcatattcattgtgagtcggtaccgggactctcctctgcacagacttgtaggatctcagtacctagaacctaaggccggatctttcaggagctggggaggagggactggaggatctctcatgggcttttcattgcttcagctcaaaaacacttccactcaaagtcattgggcagagaaaaccacacaacttaattatcttaagaggtggggacaggggaagtggagcgaccgagagaagggttggaacatacagacataagaatgagaaagtcttacgagtgttctggtctctgccccatctgtattatctttgtttctgggaaggaaatttctgacagctgtgttgctagcataacctcttggttggtaaatgcattgctgtagacttttccttgatggaaactttctccaagacaatataaactacgcattgtctctttcttgttaaaccacttttttttacagtttattttttcgtttgctgttgaagatttgatcagtattttccttttgaatccaatggtagcaaaccaatttttttttttttagaatatattaaggcaaaagaaaacaacttttaccccattcataataggatgtataaaagtaatacctcttggaatagaccatgggaattctggtgatacctagggcatcttatttgataaaatattttttctttctttccttctttcttccttccttccttccttccttctttttttttttttttttaaacagagtcttactctgttgcccaggctggagtgcagtggcacgatctcagctcactgcaacctctgcctcctgggttccagtgattctcctgcctcagcctcccaagtagctgagattacaggcatgtaccaccatggccagctaatttttgtatttttagtagagacagggtttccccatgttggccagggtggtcttgaactcctgacgtcaggtgatccccctgcgtcagcctcccaaagtgctagggttacaggtgtgagccattgcacctgactgaaagtattttcaaagcctctgctatggagtatagtgtgagatgtggagaagctgcagagggaggggcacgttagcatctaaagactctgttgaccatcatccacattaggtccattctaccattttctatgaagtctaaaataggttcctgattattttgtttttaattttttttttttttgagatggagtctcgctctgtcacccaggctggagtgcagtggcatgatctcggctcactgcaagctccacctcccaggttcacgccattctcctgcctcagcctcctgagtagctgggactacaggtgcccgccaccacgcctggctaattttttgtatttttagtagagacggggtttcaccatgttagccaggatggtctcaatctcctgaccttgtgatccacccgccttggcctcccgaagtgctgggattacaggcgtaagccaacgtgcctggccggttcctgatatttttaagggatttgtttgtgatttaagaatctggctattttataggacgcttaagtgttctttgtttaaataaaatgaaaacttcaaattttcctttacaaccatttgaccagttacctctgtttcatctgccatacatggaaatagctttcccagagaaactgacatgaaggcatgcagtctactacatcaatgacatctacattacaaataatttaaaaatagtatatgaagcagagactgggtttacctattagaaaatctaacaaactatagcaaataagcataatttttaaggaaaacagatccctctaaatggtgcaaattttatattaatgaaagaactcaatctttaactcatattcttgttatagcatgaatgatcaagctgttttctgataaatagttcaaggataaagtggtctaatttgaataatgggactttattaggggcatctgcattaacgtgatttgaagcacatgtttgtatgctcactcagttgccttttatataattacattctttatcagttgttggtaaaggttcacttcattttaactagttttcaagttctgtcaggggagagaacctcttattccccatgccctgtgcttgtgaaggggtctgggctacgtaaatgggagggagtgagactgaaggggattaagtcctggcctttgcagttctgttgtcagcctcccccaggaaccagtgcctgactccttgggtccatctgttccgagccctgacagacaggacaagtagaagtaggtctagtctttcttcctactggagggtaacttcggagagtctttaggatgatgctcttcattgaaacctgggggttatactttttaaaaaaatgtgtttcactgtccccttaccctctgattatactagtcttgtgttctttttagaacacctaaaataaagtgtaaaaaagtgcaaataaagtgtaaaaaagaggccgggcacagtggctcatgcctgtaatcccagcactttgggaggccgaggtgggtggatcacctgagatcaggagttcaagactggcctggccagcatggtgaaaccccatctctactaaatatacaaaaattagccaggcgtggtggctcagcctgtagtcccagctacttgggaggctgaggcaggagaatcgcttgaacccgggagttggaggttacagtgagctgagattgtgccactgcactacagcctgggcaacagagtgaaactaggtcaaaaaacaaaacaaaacaaaacaccaaaaaaactgtaatatagtataaaaaagaaatgaagttacacatgatcaagtcatctctgttaatcttttgttatactcttctgtctttttaagtgtgtgtgtgcttatttttttttcctcatgttacaaaaatacatttttaggtcttttgttaagaatatattgtgataactcaatttaaaaatgggcaaaggacttgaacagacatttctctaaagaagacatacaaatggccaataagcacgtgaggagatgctccacgttagggaagtgcaaatcaagaccacaatgagatactgtttcacacccattggatggccgttaagagaatagaaacaagtgttgagaatgaggatacattagaactcttgtgcattgctggtggaaatgtaaaatagtgcagctgctgtagaaaatggtatgaaggcttctcaaaacattaaacatagaattcctatgtgtcccagcaattccacttctgggtatctgcccataagaattgagagcagagacttgacagacatttgtacacccatgttcatagcagtattcataatagctgaatggtagaagcaaccctgtgtttgtcagtggatgaatggataaacaaagtatgggaacacatagagtggaatattattgagccttaaacaggaagggaattctgatacatgctgcaatatggatgaacttcaaagacattatgccaagtgaaatgagccaataacaaaaggacaaatgtatagtttcacttacatgagttatacatttcatgtataacttctcaaactcatggagacagaaagtagaatggtagtgggctaggggtagggggaaatgggaagttcgtttttattttcattttatttttttgaggcagggtctcactctgtcacccaggctggactgcaatggtgtgatcatagctcatgacatcctccatctcctggctcaagccatcctcccgtctcagcctccgtaatagctgagactgcaacacatgcaccaccatgcctggctaatttttttgattttttttttagtggagacgaggtgtgactatgttgcccaggctggtctcaaactcctggcctcaagcattcctcccaccttggcctctcaaagtgctgggattacaggtgagagcctctacacatagtgggaagttagtttttaatggtagttccagtttgggaagaaaacattctgcggatggatgatgatgatgattgcagaatggtgtgagcgtagctaatgctgtagaactgagtacactccagcctgggcaacaagagtgaaactccccccaccgcccaaaaaaaaaaaagaactgtgtgcttaaaaatggttaaaatattaaattgtatgttattgcaatttcagagtatattgcgatcatttcccacattacatatattttgaaaatgtgtttaatattccattttgtagaatatcttttaccattttatttttagccactgtcatttttctgtttttcactaatgcgaggaatactatgatgaataacctcgtttatcaggtttttctttatagataattacttcgggtaaattcctaggggtgagattactgggctacatagtatgaacctttttaaggctcttgatccatatcatcacattaccctcagaatagttactaaatttcatttcagccaagcacacttccaccagcagtgtatgagggtcagctttcattttatcttcccagacaccatgtgttatctttaaaaataaattgcctgttaagctaaacaatgatatgtcatcattgtttcaatttaatccatttttattactgatgacttctgttttttttccactttcattaatagtacctgaaatatagggagtgcttcatatttgttgaatgaatttgtcaagtatctactaggtgccatatccttttatagatgtgtgggacataatatcaaacaagactgaattatattatacttctctcactgtgtttacagtctagtggaggagtcaattaaacaattgataggtgctatcagttgaagtatgcttgacatgcaaacaaatattggtgatccctaacccaacctgtaagagatggggcttctgtaaggacgtgatgtttaagccaaaatctcgttgaatgggaggcatctcaaggattctccttctaggggatgaaatggagctcaaggaagaaggaatgtttccagaagaaaaacctcaagatgtaaactaaagttggccatttgtattttttcttataggatttggctattcattgtgctttgctctttttccccctctcctattggcttaagtttttttggtggtggtgggggagtaatttaaaagtacctgttatatagtaaattattaaacatttgcctatatagtaaattattaaacatttgctattcatatataatgttttacccttctctggttaattcgccacatcctgaacccctgcaaataagtttgtgtgtgtgtgtgtgtgtgtgtgtgtgtgtgtgtgtgtgtgtgtgtgtttgagacggagtttcgctcttgttgcccaggctggagtgcagtggcgtgatctcggcttactgcaacctctgcctcctgggctcaagtgattgtcctgcctcagcctcccaagtagctggggttacaggcgcccgccaccacgtccagctaatttttttgtacttttagtagagatggggtttcaccatgttgaccaggctggtctggaactcctgaccttaggtgatccgccctcctcggcctcccaaagtgctgggattacaggcgtgagccaccgtgcccagccagacatgccttctttattgatgtaggaatctgtttaattagatcatttttttcctccgcagagtcaaactcatagtcttgggaggaagataggaagggggcaggcagggaggttacatggggactctgagatgtctgagggtgaggagaggatgaaggcgaggcaaaggaatagatatcgttggtgatccgctaaggacagtgaccttctcaccttatctcagtcctcaacatgtaaagattttcctccattttacaagcaaggaaatcaagtttctaagaggtaagtattgtttgtggtagatctaaggttttgttttgagacagtctcactctgtcatgcaggctggagtacagtggcattatcatggcacaccacagcctcgacctctcaggctcaagtgatccttgtgcttcagcctcctcagtagctgagactaccggtggttgccaccatggccagctattttttttttttaagagatgaggtttcactacgtttcccaggcttgtctcaaactcccggtcttaagcaatccacctgccttggcttcccaaaattctgggattacaggcatgagccactgtacccagcatggatctaagttttaaacctggttgagctaataggaaaacctaacttttaaacttttaataatatacctcaatggttttttaaagggaagtactggaaaactggatgctggctttttgacttctctttgaatattaaatgagcttgactccatggaattcttgtaatcttaaatgccaaagctttagaccataaactaatcactttgtggctttctataagtcaaaaagccaattaaaaaaaaaacttttattgctaaaatttgtaaccagtatggagatttgtgtgtgtatgtgtgattgaacctgggaatcttcccccccctccgccccccttaatttccaattgagtagtgattttttgtggttggagaggtagttttaacccggtgaattcctctagcggttcttgctgaatgatttcctaaggcattttgaaaatctcttgggtagtgcttttaacctggcttcacatttcatctttctttattcagggagtgtttggattttacaccatgcttgaggctgccatgtctcggctgcaataaccagaaaacattggttttctttggtcactgaccaagcttgtcactactcatttctgcctggctctagactgaagacttcagtccaattttccgaatggcctcttttgacttactgtgcaaaacccccactttggctctgaaccattctctgaatattagcataagcacctaatgctgcttgactaaattgtttctgttgagagagggggatgaggaaaggctggcacggggaacatctgttagggctgtaccttttcattgtattaatttttctgacttctgggattattttcattatgcaactcttcaataaagcaaatttggtatgataaggacttaacattcccccccactcattttaaacatatggggtttccaggctgttattcaaagctgtcctacagactaaaatttaaaatacaagtgaaccaagattctgcagctgaatctgggctttgaggagcctacagtgggagaaggggatgaaaaaaaatattttgtggaatgtactataaccaaccaataagatgtttttgctattttaattggctcttcctggcaggagtttcatacagcggtgtctcagacactgaccaaatctgtttatggtaagtcatttttgtagagaacaacaacattcaacaggctatggtatcactccatttggaagtatgtttcctgatcttgaggtcgtagaagaaaatgacaggaacatacttgtgcccacacaggccctaatctgtcttgctggcattccttagacatttatttattgaagagtccttgtgtctatattgaggggagaaactagataggttaaggaatggatgataactttgattctgagagctcttgcgctatcagaaggaatgtgattgacggtgcttgaatgaaagggtaactgttacagtatcaaccaagagatagaggatggctggttttggaagctgacttgcaacactgttatatctggagttataaccttccagagtgttacaaagtttccagtctattcttcctatgtctgccctcagtgagctagcattgagattcggctgtttatttgcagaaatagttaatctatctttcttttaaaattaacgccttctggaaacagtggctcaacggggaaatgaactcttcactaaaatctcacatttcttacgcttccacttggaataagatccctctcaacacaaataatgtttaatttttttaaccactctgaagctaacttaggtttaattttagtttatgctaaaagtttttcttatgtgactcctacagttttcctagagttattgaaaaaactgctcctataaagcaagtttagtttttattctgttcattttagatccttaatattgttctttcattactacttgaggggaatttaaaaagaaagaaatataacagctgttttgaagtacatttgaaaaatggtaaactgcagaatctgttgcttttccttgactctcttcactctcccccaaagacctttaaatagaagctgtttccttttgctgcattaaccccaaaccctatctgatttcttccagttgccgagcaaacagtggcagcttgcctctgaaggccaccaaaaaggaccaaaatgtttgcatggaaatggcaaccaagaaacccctaatattaagaacctaccttgaaatctgccaattaatgaatggaagcttcatcagattttcaaatggcttttataaaattatataatggaggtgaaagtgaaaggtctacactataactcctattacatgagctaaatgtgtaagccttaccatttgatgtgctcttctaggcttaacagtaaggaccattttggagttaaaattgtgtggattagttctgtgttaaacatgtcttcatctcatttatgtattgtattaaactctttggggaaacagataaaaaggacattttaggctttacaaacacgctacacaccataaaatgtttgtttcagcccattgcttactccaaagcaatggccttttgcttgaagataatctcaataatagaaaacagttaccaaaggaactaggttttgggtggacgacttagccctccacaagggactgcagaatcctggtatttgaactggcagggtgtttggtttcttttttttttttcttttttttttttggcttgtttgttttcgtttgtcagaatatggccccagtttggtttaagttttgaatgttcaggaatttctcagagcagacaggggtccataagggcttagtagtgcttctactgtgcaaacagtgatttcttttttctccaaaaattaatttggcgtaagtgtgatcatggctgcttgacatttttttgttttgagatgggagagcataaaccacattcaaaggaaaaattagagcctatgtattagaatatttaaactgcttaatgtagagcaaaggaaaatgtcacaattggatgctgttgtgttctaagcaagcaatgcttctctggatttggatacttgagaaatcctttatttagaagtcattcatattcatctttaatacagcaactgtgaatatcattagccagaagcaataaattttgtgaaaattatttggcaattgagaaggtagggtagccagttgaagtcctgtgggcccaaggaggaacttggcagtgagttattgtcaaaagctgcgagtgccaggagtcagcccaaggagagttctgtgggaatcagaggagtgtggggccagttgagtccttatattatttattcctgcaagcatgacagattgattattacggatctgaaaaatcacttgcatgggtcttctcattctttttcacccctcttttctttctttttgggagtggataagacttaaaaaccacatacctcaggatacattgccgaatcaaaatttttctgatggtcgcagacttccgtgtctagaaagctgctagctttctactatttaaaatacaaattttgggatatggcaagcctcaccatttcttcactgtatgtagtactgcttgctgggcagcagacagtaaatattaagtaagctcttcaaaatcagtttcattccatcagagcatggtgacatttttttcccctgcttttaatctctaaggtgcaaattttgagggatgttaagtaattttaaaaatttatctactgtctttgtgtttgctgtgagatatctttctggagatagaaaattaagtgaggcgtgttgttctgaaatctgggtgccagtaattcttgcatcgtagggagctgtgccttgcactgtgtatacatgtcaaatctgaacatctcacctcgaaagaagtttgccaaaaggtaaaaagcacttcccaaacaatcctacggttttgagtaaggagtactcaaagaaagaaagggactgttttcagatgtttcataaatggtaatcaatcactaataattaactaggtacttgaccatgcaggtatgctcccagcacagtgcgatagcagcttagaatttgagattgaacttttaccctggttatctttagaatactgtttctctttcatttatgtgaataaacatgtattttgcatgttactgtaaacatttatatatccttatacctttgcagtttaccaagaaaggcttataaaattgtgataaagatttctagtgaattattttcttacagctcttatgcaaggaattcaagatttttgtattatcctgagtcatagatataagtggtttgataggttataagctatcttgacactgttctgcatttataaattcagccattctgcaaatgtttctggagcacctgctgcacacagacaccaaggacacaccagcgactaagtcagttgtggtccctacttttgagggagtgttgaagtctattcaattaaaagccaaatcatggcggggcgcggtggctcatgcctgtaatcccagcactttgggaggccgaggcaggcagatcacaaggtcaggagtttgaaaccatcctagccaacttggtgaaaccccgtctctactaaaaatacaaaaatcaggtggacgtggtggcgcatgcctgtcatcccagctactcaggaggctgaggcaggagaattgcttgaatgcaggaggcggaggttgcagtgagccgagatcaggccattgcactccagcctgagcagcagagtgagactccatctcaaaaaaaataaaataaaataaataataataataataataataataataataataataataaattcagagatggagaaaactttgggaggcagggtgagcatctgaacctatttgaatgtagatataactaatgccaagcaagggaattatggggacaggacagaatgtcaaagttatacacctagaaactataaaaatagtgtaacagagccaaagtctggaggcagagagaggaaaagtaagagaaggtataagcatgctggtgtccacatctttgatagtagatttaactgattctgtctaaaacaaaagcattgttcaaaaaaattgcttcagctttttaaatattttcaccatctcttaatctgaaatttcattaattttattttgttagagtcaagaaaaattatatcagaagtgaaaatagcatgtggaacatgttcccattttcataaagattacttgtcatccatccttgttcatagaaagatggctagaatggtttttgcttagtgttaatgatattatttctgtgtgttggcatttgagttgatttatttttacatttgtctttctactctgcattgcataaattctctatttctttttttaaaaaagaagcataatatgccaagatgtttaaagtagataattttggatgttgagaacctgaataatttttttttttgtagttttaatttccaaaattaggggagagggagcatcttgtttggtttaccgtgctgaccataggttatatgtcattttatgcatataagtttaagtaatttaagtaccaagttactactagtacttgatttcctaagttgctgggaatatacactgtgggctgttcataatttttggtacttaatccatttcctctctgccatgcttagctttttctctatcactttcttccccccttgtctattctggggccatatcactctttgttatccatcactgaatggcctaacttcctttcaaacagagtttccctcatttggttggttttcggttttcatggaaagctattgaaggggtgtaagtgagtatggggtaggggaagctggttttgttatgatcaggtttagaagttcatttggcctgctgtgcagagaccggattggagggagactggagtgagtgagactataccagttgggtactgctgaacagccatccctgaaagtgatggcgacttggacggaggaggtggggaggtggacttaagaggctgtacttgaaaaatggactagacttagtggaagattagatataaagggggggttgaaggacagggagtatccagggtgacttgtaggttctgagcttgcacaataggatggatggcaatccatttgctgagataaggcatgatggaagaggaacttgatgtttgtttatgtctgaatcatctgaatcatgaggctggaccaggtgaccttgggcttcattttaaaattgatagcaccatgatgcctaccattgtatgttttcagtgagggctcatgagtgggtgtcttgggccccatccctccctaacttagaggaaaaaaaaaattgtcagcagcattttctggggagaggttccttccatatttttcattaggctttccaggggggccttggctcaagaaaaattaagaaccactgactaagtatgttcagtcacagtgaccattcaataaataattgtcataggctcgtaaagcagaagaacagtatcgatgaatggaaatttcctattcggcattttagaagggagtttgaagtgctcctaggagccattttcccagcatggtcttttctgaccacctaagaccaaaatgattattcagtctcttaattcctttagcggtaattgtgcatgtactatttcttggctttatttttatgtttttttgactatgctgtttagcttttccaatagaaacagctagctgtgccgggcgctgtggctcacgcctgtaatcccagcactttgggaggctgaggcgggcagatagcttgagctcaggagcttgagatcaggctggccaacatggtgaaacccatctgtaccaaaaacaaaaaacaaacaacaacaacaacaacaaaaaaacagttagttgttattagcctatccccatgctggctaagttacataatcatccctgtaaagttagtgttggcatccttattttagagatgaggaaactgaggcttagaaatgtaagtaaatggtagctagtaagtggcagaactgtgatttgaatcaaggctctttgactccagagctttctttttgtcacagatattgacaagtcctgctggttggcagaagtcatacctatactctacttttatttattttgagatggagtcccactctgtcacccaggctggggtgcacttgcgcgatctcggctcactgcaacttccacctcctgggttcgagtgattctcctgcctcagtctcccaagtagctgggaatgcaggcacgtgccgccacacctcatgcctgtactttgtatcacacattgtgcattcagatttttactgaaagaacgaatatacctattgcagtatgatcaagcctgttttatgtaatgcccctgcatatgctcagaatcaaggattaccctttttatttttctcatttgtctcctatttcttttgcaaactaaataccctttcccccgcaccctctattgctggattttcttaggaactcttataccttatcttgctttggaaatagcaaaatacacaggattacagaattgttatcaattcacacatttgagatttatatgttaccaccattacttcctacaccagttttctagctacttttgtgtgtgtgtgtgtgtatttaaattgtgattgaattagaaaaccttgttaggaagttgaatttctgaagcaatcatttatgttcagcctgtgtaactaatggacaattatctttcagtttcctctggaatcttgctttaatgactttcagagtagtgtttatatatgccatcacttgcctaattagttttataaggaaatccgtgtcatcccgggtcatcctgccaatagaggcagcttccagttctcttgagcctcccgagggatgcattcccttcacaaagtgctggaagctggctttcctggagctccagggtcagggaccattttcctttttttatcatggaaatgaaaaagtcagtgtcagggaggtggctgactgtacgacagtcctgattattgacttatttctcttaccttaaaacttgagttatttcatcgtaaaattgcaggcaggaaaaatatatagaagcagtagccttcagattgaggatgaagaaatctctctgaacttcaaggaaatttggaaatgagcaaaaattttgaaaacatttgaaaatggaatttatagccctaataaaaaatgcagttaggtgtatcaacattttgattcctagaccaagcacagtgcctggcatataatagatggctaattaatttcattgaacgaatacctaagtagatgatggatgaatgccactggaacataatgtccatgagggcagtgttgctgatatttctagcatcatctagaaggtgctcagtaactacattctgagtgaatgactgagtgccagtaaaagataagctattgcgttatctttttttgctttttttttttttttgagatggagtttcactctgtcactcaagctggagtgcgcacgtggcactatctcagctcactgcaacttccacctcctgggttcaggcgattctcctgcctcaacctctcgagtagctgggactacaggcacgtgccaccacgcctggctaatttttttgtgtttttagtagagacagggtttcaccgtgttagctaggatggtctcgatctcctgacctagtgatctgcccaccttggcctcccaaagtgctaagattacaggcctgagccaccacgccctgctgagatatcttttttaaattaaaaaaaaaaaattagagacagagtcttgctatattgcccgggatggacttttgaactcttgggctcaagcttcttgcttcagcctcccaagtggttggttttacaggtttgcgccactgtgcctggctgttgggtggattttagtatgaaaactacagatcctaagagatgatccctgggcatatcaacaaagtatatgttttaaaaagccaagcttattagaaatattatgtcctatgatactggaaatccatttttatttgaaaatattaaatagagttgacatgttgaattttttagtatagattaaggcactagttcttaggatggcttttggtgcagtgactcacgcttgtaatgcccagcggaccttgattacttaggttcggatacggggggaattatccctaccctttgggaggccgaggcaagcagatcacttgaggtcaggagttcgagaccagccctggccaacatggttaaaccccatctctactaaaaatacaaaaaattagctgggcgtggtggctcacacctgtaatcccagctactccagaggctgaggcaggagaatcacttgaacgcgggaggcggaggttgcagggagccaagatcatgccactgcactccagcctgggtgacagagcaagactccatctaaaaaaaaaaaaaaaattattggggactctaaagagttttatttacatagattttatctactgatattggtcatattagaaatttaagatgagagattttaaagatttattaattgatttaaaatagtaatagtaatccctttatacagttacacaaactacataattttatgaaaaaggacattttccctaacaaaaaaaatttagtgggaagagtggtgttttacatccctcttctgtctgacttaaataaaacatagatggactctcagctgcttctgcttcaatctgttgtgatatgttttggttgaagtgtatgtctaacacatatatgtaattgaaaaaaggagggaatattttaatagctttttcacgtaactggagatattctttgatacttttgatagtggtcgttggcaagtaagtttctcaaaggttggttgcaaggtagagaatgaaaccgtgtctgtgtttcatattggtccatcttatgtgttgaatggctcttttatgtgttggtgtgaccgcattctttagtttggaaaacactatttcattgagttctgcaggttcttctaaatgttgacacatttcattattcaacatcaaaaaagtcacaattattagtatcaccatcagtctcatcaaagagcctttaagtattattaggaagccgtcaagctgacggtagatgcacattttctaagattgtgtttttcacttggaaaactttattgtatttcaaaaaagtatctgccaaatatccaagtctaagcaaccatattgtagttgttcttttgagtcaaagtggtgtttcatggagagagtggctgctcagctcaagacagccctcatccctggagtgtagccaaatgctttatgtgtcagaatatttactcagaattctgaaccttttttttttttttttttttttttttttttttgaggcaaagtcttgctctgtgcccaggctggagtgcagtggcccagtcttagctcactgcaacctccacctcctgggttcaagcgattctactgcctcagacttatgagtagctgggattacaggcacacgccaccacgcccggctaatttttatagttttagtagagatggggtttcaccatgtttgccaggctggtctccaactcctggcctcatgtgatccacctgccttggcctcgtaaagtgctgtgattataggtgtgagccaccatgcctggcccagaatcaataattgttaatgcttcatcgagactttcttaaatgaaactggcataaaagacaacaaaaagcccctgggatttcatggtgggaagaacataattcctgctagtaccgcctggcactgtcaccttgactcaggctaaggttcctgctgtcacaccaccattgctcttgcaccatcagtgcaaacgtcaacacaaggaaaaaggcaaatagtggctcagtattatcattaaagtggtttgatcatgaggacccttaagggtttgtggagcatactttgaggcacactttgatttaagaggttagaaacatcacattaaaattcatactaataaagtgaaattgtgccaattgcccaaaacagtgcatcaatccaaaactcttatttgtcttggagaaatgcattcaaaacatagtcaacaccactatctcattttgtctctgtgttgtgttaagatgggtttgcatactttcagcctcttagagcaggcagttggaacattatccagcagcaggttgaacagcagagggggagggcagctggaagttaggctaatctaacaaatgagtcatccacatgtggataatggagttgtaaaattactctcagctttagtcagcagcaaccaaactatacggttaaaaattacaggtctccaaaatagagacttcctgagaacttttagtatagcatttaactgagaatgtatcaagggtttggttgaggattttttcataaaacctttctgttctggaaggcaagtttgttattaagagcttcagtaatttctcttacgaagtgttcaaaatgcaccagaacctgaacacaatgtgagcagctgagtgttcatcttagctgcgtccatcaagtgaacggtttgctctcttcctgtccataatttgagagtcagcctaatggtgagtggacagtcatctaataaaatatttcatacctgtggcagcaggtataaagcaaatagtttatttttgctttccatgtaaagtttggcagtaaagtttttgtcttgagatttttgttttataagagaaattaaaattccttctgggcttttgctgttctcccctgaggatgaatatgctgcctgcctaccctgctaccccccgcatttggcaaggttgcacatgtcttagggatggaaaaccagtagccaacactaaaccaggcctgctgtgtagacctggcttggtgagtatggagctgttccgcagtagaggtttgcaaagaaaccatcacacccttgtttcctctctccttctggcttttcatttttcttctggccttttgcatggaagaaataagtcatcccttttgaacagtttgggtatggagtgtttgcccatgcggtagactctggcaggacagagagggttttcccgggcctttagttgtccaggtcctgtattctcacatctcctctgggctgctgactgcgcacaaacacaaaattcattcctccaatagaacagtgtttggcctggctcccaaaaactgctctcctcacttgcacggctttgattgagtgttaggtgtctctttggctgcctccagtgtctcttatttttagggccttcgttaatgtcttctgtgtgtgaaacatgaaaatggagccatggctgctggaattggaaacttagggtttttaggccaccattcccttatcacatggcgttatcaggttatttagttacagaggttaaaaaaaaagtccaccctaggagccggcgtgtgtggggaaaggagagagggggcagctgagcacctaatgggcagtgaaaaaagatactgtaactaaagctcgggctagtgtcctcagagcgatggcctttcaggtgctggcaggggtctgcttacagctcagcctggttacaaatgaggggataaattggtggtaacagtgcctttttatttttttcctttttcctttggaaactggcttttcacatgttggaaaacgagcttggatgctcggtgtaggtaacaggcaattctgatctgagaggaagggctcaggaaaggtgtgaccaaatgagccgtctgagtggtcagtcctgcccggggctcacccaggcagggagctggggtctttcatgtgggtgtccgtggacccacaggagacagggagggattgattacaggggagaccacttctgtttccctttcctaaaggaaacagaaaatggaaataaaaatctaaaattatgttattttccatttttggaattctgttcatttgtgtttggggccagttttattattttttttaatcttttttgagacaggatcttactctctcacccaggctgcagtgcagtggcaccgtcgtggctcactgcacccttgacctcccaggcttaagcgatcctcccacctcagcctcccaagtagctgggactataggtgcacacaaccacacctggctaatttttttttccccttggtagagatggggttttgctgtgttgcccaggctggccttgaactcctgggctcaagcaatctgcttgccttggcctcccaaactgctgggattacagacgtgaggcaccgtgactagcctgggaccagtttttgacggtccctagccttccatgagcattcgtgtgcaaatgcacagtccagaggcatgtttagttgactctggtttcctccctccctttcaatgtgtggaactcgcagcgttctttctctgcattgctgcgatctgccacacttctcgttttatcatggactgcagtacaatgtaattgtctgtgtgccagtttcctctgtcttactaaagtgtgaatgtttgatggaagaaactctgagtggacagggtctgtcataatcaccccagtattccccatcgtgtggtgctgagcttggtatgtagtggggagtgggtatgcagtgaatgtggaatgggtggatgcttgaatgagtacagccgaatttcctggccaggaaaaccgtgaagtgttagcactgttctgattttacttcctccttcaggctatgggcgcgtgccaactgacagggcagggactgccatggctagtggctattacctaaactccagcccagttttggtgcccccgtttctgagtcctgagcaagtgttcctggcattgtgttggttcctatggtatgtgttttagtctgtgagactctttcctcagtttgaagatctgaaagtaaaatgtttcacccaaggtttttagattcgagagctcatcccgtaggccagggagagtgagtactaataccctatatgtggctgtgtttagaaagggctattgggaaacataaaaaatagattttgacattggaaacaaatacattttagtatgtgctgctaaagaaatgtgtgctataagctattctcctggggttataaatcattaaatattaactttttaaacgattaaacatgtgactatatcttattggttacaaataataaatgcctactcaaaccagcgtaaaccataaaagtagaatttgtataaggattcacagggtggtttatggggagaagggcaggaaatgctgccaggctacaagggagtctggaaccaggactagggcaataccaggagccaaggcactgctctttcaccccgagaaccctgggactcacccgtgcttctctcccagtatcagattcgttctctgtggcagtggttgggcttcctccacttccctgctcttagggtctaaactggcagtgtcacgtcgtgagcatacctctgccttcaagttcaaatgcagacagacacaagtctctgtttaaattcctgaggaagaatttggttggcccaatgtggtcagctgtctacccaagtccaatgaactctgctcatgggaatggggctggggaataaatgtggcttagagggctgacgtgagatcccagagtctggaagctatttcaaggttctggaaatagtctagtagggctacaaaactcagagcaagccatagggtccggacagtaccctatttcctttatttctaattattttctgctctgccttttgagggaactcatcagtgtcttcctgaggcctggaggcttttctgtgatcatgaaatgtactatctgaggcctggaggcttttctgtgaccatgaaatgaactatcaagagcagggcatgggctctgcagacagcccaggagttctctgctgcagggctaagtgataattctgctgaggcggttgacattcttctggttagctttagggcagatgaaagggaaagaatatcaggagaaaaaagagcatcttgaatttgtggtgttttttgaggttttttttttttttttttttttttgagatggagtctctctctgttgccaggctggagtgcagtggcgcaatctcagctcactgcaacctccgtctcctgggttcaagtgattctcctgcctcagcctcccgagtagctgggactacaggtgcgtgccaccacactcagctaatttttgtatttttggtagagacggggtttcaccatgttgaccaggctggtcttgaactcctgaccttgtgatccgcccgcctctaccttccaaagtgctgggattacaggaatgagccaccgtgcccggcctgagttgtattattttagggtttggggaggagggaagtggcgaagaatggtatatgaagggtgttcttgatttttcagagatgaaataattttatccagccatttatatttctatgtatttcttcggtatctgtttttaatatcctgttagacgttttagtctgtcaagagttattgctaattgtcaaccaactacctggttgcaatgaagataggttctttttatgccatgcactccagagatctactacacagctgggtggctatgatttgcattaaactaataaagtcccctggttaaaggggtatgtcctagatttaacatttgaaatcctttccattaagtgcagcacaagcagatctttctgcacattttggtgaagcttaaccatttttgatgactcattttgatcctaatctttaatttttctgattgcttttggtaaccttctatttgggctgtgtgccgaattttatgataggtatcctttagacggcagatataatcaggtgatttgattcagaaaaggagtttgctttcccttccgacttctgttttgaaagcaccaaggcactgggcatggtgactcatacctgtaatcccagcactttgggaggctgaggcgggtggatcacctgaggtgaagagttcaagaccagcctggccaacatggtgaaaccccgtctctactaagaatacaaaaattagccgggtgtggtggcctgctcctgtaatcccagctattcaggaggctgaggcgggagaattgcttgaacccgggaggcggaggttgcagtgagccaagatcgggccattgcactccagcctgggcgacagagcaagactctttctcaaagaaagcaccaaagaattcccccaatagaaacagtgtgtagaaaataatttggaaatgaaggaattaagatggtctgagatttttgtggcttgctctgtgttttatagccctggtgggctgcaaacaggtatcttgcttcagctctcagagcagcctcagtcactgggaactttttttttttcacggatgctgctttctcagcttctagaattgcctccttagtcctgagttagaatgtcagagacaggttttatgctactttgctggcaaggatcaccatcgcacacgtcatgtagtttatcttgaaattttatgatttgggaatcagattccttcaaataagtttgtgtcatctgttttgttgagagagctcgtggctaggatcgcagacgcgaacattgtttcttcctgaattgtgtccttgagttggttggtgtgtatctccagagtccattgtttcttttgcagaatgaaggaattggtctgcagtgatctcaaagataattccaacccagcacaccaggactcaaacttaagaaagaattatttttgttatgagtcatgtacatttagggttcttaccagacagaataattaaatacatgcagctctgctccatgcaggcaggctctgggtcctcacctctgcatacaggatgctgagcatggtagtggtttaatcaatactgttggtggtgtaaatggatgaatggtggccattctgaaacggctttgtaggatctaagctgtgttgggagccaatgtaagtctggtctctgtcatttggagtatattttgaaaatagaagattaaaacccctcttcatttaagttgccgtctaaggtcctggaccagccttggttcacccaggttttttcctctgcaggacattggctcacagaaaacagggctgcccccttttcctgcatatttggcctcggactgcctacttgactaatcagtttaagctcttccctcttaggccattaatcctatttctccagccgagaagcagcaggataatagtaatgtgtcctgtagctattaaaagatgatattgccttgcacataaataaagtacttttttttcctctgcaaaaggatgatcaaacaaatttaattttcatttatgcttttgcctttttgtgatatttctttgtatcttctagtacaatcaggggagaacatcatttttactgttattgatggttattttctacttgttttcagcatcctaacaaggtatttgctttcctatacatcgttacattttgtcatcctatgatgaactctcgttgctcgagggggcgaaaacagagtgaacgtggaaatgatctttggcatgtggtattttctgaaaaactgaatttcacaataagcacatttcgtggcatttgctaacaataatctccacattcctagaggtcagattttctcattgaacacatttttttttcttttcagtttatatatgcagaaagggcttcattaaaactgagatcattctcattcaatcttaagctggcagccaacccagatccttttaatccctgctgtatgtgctaatgaaaactcagggaagtgctgatgaaagggaggtggtgaggctccttcctctccttgcctggagacttaacctgtacatttctaggcttttcagagttaagttttgcacctgcttgtgcagtggtgatggagctcctgaggtatttctgcatttgcttcctgggtcttgaatttccaccattaaatttcagtctagtggcgggtgcatgggtgtgtgttacatcattctgagtttttttgtacatccaaaataattttgtcatcaccatgatcgtggctgccatcatcatttcgacttttgagagtcagtttatcctctcacccagcaaatctgcttttgagaattggccctaagcaagtaatcttgaatatggaggaagatttttgcacaatgaacctgcccattgctggtttattcataacagcaaaaacattggaaacatccttttccagttttgggggaaatgattcagtgatgattggtactgtatattcaagtaatagaatattaagtatcctttcaaatcattgcttaggataaatatggaaaaatgctcttgaaaatataccttcccaattataggaaagatagtaaattatattcacagtatgattaaagtgatgttttttttgagatggagttttgctcttgttgcccgggctggagtgcaatggcatgatctccgctcactgcaacctccgcctcctgggttcaagtgattctcctgcctcagcctcccgagtagctgggatttcaggcacgtgccaccaagtccagctaatttttgtatttttagtagaggtggggttttgccatgttggccaagctggtctcaaactcctgatctcaggtgacccacccacctcagcctcccaaagtgctgggattataggcattagccaccacgcccatcggtgatttttttttaatctagtttttaaaatacctgaacagtgatggtgtaaaggacaagatgatagaagacttttttcttttcattttcttgattttctttatcatccacttttttaaaagacaccaacattatttgcataacaaaacaccatataggccggcacggtggctcacgcctgtaatcccagcactttgggaggccaaggcaggcagatcacaaggtcaggagatcgaggccatcctaggtaacatggtgaaaccccatctctactaaaaatacaaaaaattagccgggcgtggtgtcgggtgcctgtagtcccagctactcgggaggctgacgcttgaacccaggaggcggaggttgcagtgagctgagatcgtgccactgcactccaacctgggtgacagagtgagactccgtctcaaaaaaacaaaaacaaaaacaaaacaaacaaaacaccatacagatggatatctaaaagtgaatgagacttgaaaatcagccagaaatgtttgctgtggtgataaacataacccttaaaatgattttttaaatatttttttaaaaaatagggtcttactccaatttcccagcctggagtgctactggagtggtgtgatttcagctcactgcagcctccacctcttgggctcaggtgattctcccaccttagcctcctgagtcgctgagactacagccacaccaccatgccctgctatttattgattttttacttttgggagagacggagttttgccatgttgcccatgctggtcttgaactcctgggctcaagtgatccacttgcctcagcctcccaaagtgctggggattataggcgtgagccaccacgcccagccaaaatgaattctttggggtccagaaatcttgtcttttgcaaagatagtttgatggggcagggttgctgggaaatgagggtcccaggctaacagttctctcaaatgtgcttcatggctcctgagtgccagctctgagtcatgggtataggaactggtggaaggagacagagagagagggtgctgaagctgggtggtgggggagggcactagaggcagctgtggtctaagtcacacttgggtcttgcatctggctttctgcttttattactattatactttttaatggcaatgagctgtagatacaaagccagctttgagttgttaagaataatgaggtctgtcctgacagtacaggcagcagaggcataagcaaataaatcccaatgtattataatatgcaattttatatttagacttcgaatgcattatgatcattataaaaaatgtctatttctaattctgttaaggaagatggtatagcagtaggggctttggaattacaacagggttgaatactggcgctacttgttagctgtggtttttggataagtaatttaacttttcctggcagagttttctcgtttataaaatagaaataatactacctttctcataggagtttgtgcttattaaatgagaggtaatgtatgtgtgattcatggtgtatgtttggtagatgatgattatcatgaataactagtaaagtaagtaatgtgatttaagttatgttattagaagtcccactgaatgccgtgtcaataggaacacagactcatactagtttggaagggaaatctggctcggattctaaacggtaccttggaagtgcagatggacaacagaatgattggagatgagtgccttggtaagccagttctttctggtgaacttggaagcagagaaaagagtaacaaaaattatggaatttaattatattaattagaattatatgatgattataatagaattgccttttgttctggagttaacattttataactttataattagatctcttgaacatttgaaaagttcaataagtacttgtttgtgtcatattagtctattctaattgatacacatgcacatagagcacaattttttttttttaagcccaaaaagtttattagcgttgggatgggatttgacgcactgaggttttccctggacaagattcttaccttctttgagggctgagtttaaatagttattcccaggagggcagaggaactcttccgttgtaattgaataataagtgtcattcttgggtaccagataaacttaactgatcacttaattgatgctttgaatggctgcataatgtgtaagtccttagaagccagagatgagatttgttcatattttgcccttctagtacctagaaggtactttgcacatggtaatgaatacatgtgtgaattaatagatggtaatctattacactctacccatttcctttctcaaagattcaagcctaaggctaacatgatattgagaagaagaaacgtaactaccttgctgttgacagtgtagcagcaaatgtaataatgtgtggaacttcagggtttcttgttcattcggtggtcagcatacaaaacatgcgtcagtaccttttttcttgtcctcttaaaattttatttctttacccccagagtgatgttggcacatttgctctgctgaaatgatttcaagagctcttcattgctgattcatttaatgattactgtccaaatggccccactcccacaaggaaaagtgtctccacattaacaagcactttcttctgcttgatttctatggttacatacgttgtgtcactttgaggagttggaaataaatttaacaggatattaggatgagagtacctttaaaaaaaagttctgctaaggaagtgtttcatcctggtgaataatgaaatcaggttaaaatttgtcttaaattaataatgactttcgacgtagtccttgttctcacatttcatgggctgattgcttttttattttagctgaggtcatgttaaaaccaaaataaagttatttgaaaatctagtgcaaaattttatttttctatcaatttgtgattcccagagcaaatttggggagagccaagtaaattaaaaagtgaatttaggtgatgttaagtctaagatagccctcaataaagagcttctcagaaaattcttgagtggcaccaacttttgtcactaatagcccacagacacgcgtcactttaattctttgaaaacctacactcaacagaaatgataaacttataaatgattttgcaatctgctgccggtttcttaaaaaaaattatcagtttcttagtttattctgaactggatttgatacacagaaaactggttttcctgcctgcttaggaatatatcacatcatgtaataagcctctcagagatgtagcattgagcagattaaggcctcatttatagaagaattccaccctggccatgtgggcctgaaactctggagggctttaacaatgtcttgaggtcattgtcatttaaagagatgactcagtggttttatttagtagaaataaatactaaataaataatctccacagattatccagaggggtaagttgaaggatgttgacagataactcagtaaattgcgtctcaaatattaataagtttattctatgccagcaccaaaaatatttcagagatgcttttaggcttctctcaagtatgtcgggaacagaaaaggattatagaaatatttatagtaggcataaacttgcacaaaagctcaaagtaccttaagcaagcttgttgcaattattcttttggagaactggattaagtaattatttcttgttgcctctgactatttaacctcctactaaactgcccattgtttaaatgtctcttatttagctctgtttttatcactccttaaatttaatattctcaaggccaaaattatagcagtgatggtcaggacatctttgaagacaattagattctgagaggataatttatatgtagaattaggaatattcatatcactcagaagtatcataaaaaccattctttcacaataacttttccactcaaacatcgccgaacttgattaccaagaccctaactgtatttcacttctttgcagtatttgaagttggagggaagggcttccacagctgaagagtttggctaaaccatgggaccctttcacattggctgagggggtgacagtgggtattgatccaagccagcccgcccttacttggttggaactctgttttagtacttgggggtgacaggggaaaggcctggagagcatcagtcctccatgagtcttagctgctccacgagaaaagtactcactgttttctcataggcattgccacagtattctctgacgagtgtttagcaggcatggcctggtctgggaaagtcctctattccttggccctgcctggaagttgtggcgcggggaggccatggattggaagaaaccctaaggtggatatccgaagggctcttaaatgttgcttgtggcagctgggaacagggatactaatgaggaaggacaagctcttcgatttcaggtggttcaggagcctcaggcaggagtcagatttaagggataagtggttcctattttcagtatctctcctccacaggtctttatggaaaatcttaaaacccactcttgtcatccgaactggataatgcaggttcttggcccttccagtgctacattgaaccaagggttcagaaacaattgagcggtgggtggtcagttccaaagtggcgcttagaggaagtctcgaagtgaagagggaggtttagggaatgagtttggagtcgtgttttcatttcttttggttgaaggaatttaagagtatcgtctttatctggttttatgtattgcttttctttttgtttggggtaggtgattaaaaatagaaaagtggggaaagagacaaatttagccttcaacaagctctcggtgatctgtgaccatattgttttcactgaagattatttacaacatgatgcggccttggttgctgctgagctggcttcagggcagtagataggaaggatgtttccaaggaaaactactctgaatgaacttgtccttgggtatgtgagtaactgatatcaaccaaaccaaatgtcaataagtcattcattgtgaatcatcctttttcggtcttgacactgcacgtaccagatcagttgatctctctcctttgtaagtctttcaaaagacgcatacattagatttttttttttttttaggacagggtctcgctctgttgcccaggctggagtgcagtggtgtgaccctggctcactgttacctccgcttcctgggttcaagcaattctcctgcctcagtctctcgagtagctgggattacaggcacccgccaccacgcctggctaatttttgtattttagtagagatgaggtttcaccatattggccaggctgatcttgaactcctgacctcaagtgatccatccgcctcggcctcccaaaatgctaggattataggtgtgagccactgcgccagcccatacattggattttattttcctccaacagcgtggactctacccagtcttcctggttctggttttccaatagttttcttttcttgaaggtggtcactgtttcttaaatgtttatagatttactttagctttccattaagaaatcaagtaaatcagatgtacttgtcctaatgtagtaatatagataataaaattgttagtggttaatatttcctgaacatgttctctgcgtcaggcaccaatctaagtgggacttggctcagtttccacaaagccccatggaatctggtttacagagaacaatgtgagagtgtctgtttccccacagccttgctatagaggccatggtatcatctagtgacaattttcatcacctgctctattaagccacttgcgtgttctagaaggggttgagctctttctttctttctttctttcttttttgatacggagtttcgctcttgttgcccaggccagagtgcagtggcaccatcttgtctcactgcaacctctgcctcccgggttcaagcgattctcctgcctcagtctcctgagtagctggaattacaggcatgcgccaccacactggagtaactttttgtatttttagtagagactgggtttcatcatgttggccagactggtcttgaactccagacctcaggtgatccacccaccttggcctctcaaagtgcaggggattacaggcatgagccaccaccatgcccagctgggttgagctctttctcacctgtaccttttagtgccacttcctctgagcagactctcccactctttagccttcctgatgcctcttggctctccaggctgggtgtcatctgtcctctgctcaattgtcccacgatttccaatgttcaatgttataattgcctggtggttgttggatgccttcactggatcctgagctccttaaggttgagataagtctcacttttgtgtctcatgggcctgggacacaggagataacaggtgaagtctgttgatcttacctgatggggaaatgtattttttctgtctccctcaactagtgaggtgccttgcaggttttttttttttttcctctttgttttttaattttttgagacagagtctcagtctatatagcccaggctggagtgcagtcgtgcgatcttggctcactgcgacctctgcctcccaggttcaagcaattcttatgcctcagtcagccgagtagttgggattacaggcatgtgccgccatgccaggctaatttttgtattttagtagagatgggattttgccatgttgtccaggctggtctcaaactcctggcctcaggggatccacccgcctcagcctcccgaagtgttgagattacaggtgtgagccactgtgcctggctgccttgcgggcttttaggcacctcaatgtctagttttgtcagaatagcatcctagaggtcttagaaatcttacctgttggagaaagttttaaagtgccccaaacatcccagcagttgtacatcctttaactcacactaaaattcatcctgttttgctttcacaggtatgtacattttgatgaaaagacactgcaaagatgagcaccagctagccaaattgtgtagtaaacattgcatgtctatctgtgtgtgttttattgttttgttattttatttagtcaacccttttgttattttaccataagttcatttacacagggtaatcttctcccattacagttgcatggaaggaatcttagaggaaacagttactgattttcttagtgtgagaccagaaaaatgaagcgttggtattggccttggggatttgctgtcctttatcctcggtaaagcaaaccagccatccgaatgtaaaggcagctcctttctttccataagtaataagtcatgatttcttaatgaggcaaattatctatcatttagtgaattcatagtatttgttacaagtaaattcattaagaaagagcgctattccaataaagccaatttaattacgcagacaattaaggggcatcttccatgtgctctgcactgtgctagccacggggtggatatagaaatggacaaactagggatgggcttatttatttatttatttatttgtttgttttgagacggagtctcaccctgtcacccaggctggagtgcagtggcacgatcttggctcactgcaacctctgcctcccgggttcaaacgattcttctgcctcagcctcccgagtacctgggactacaggcgcgtgccaccatgcctggctaatttttgtatttttagtagagatggggtttcagcatattggccaggctggtctgaaactcctgaccttgtgatctgcctgccttggcctcccaaattgctgggattacaggcatgagtcaccgtgcctggcctggaatgggctttttaaaggagattatagccaagggcagtggtgtgcacctgtagtcccagctactcaggaggctgaggcaggaggatcacttgagctcaggagcactgagctgtagtgcactgtgccagttgagtgcactaagtttggcatcaatatggtgacctcccaggagtcggggaccaccaggttgcctgagggaggtgtgaacctacccaggtcagaactggagcagatcaagactcccatgctgatcagtagtgggatctcacctgtgaatagccactgcactccagcctgaccaacatagaccccatctcaatcaatcagtaaattcatttattcattcataggaatcacagacaagggagtcacttaccataaaaaatatacaaaataaatgactccagaggcataaaaccaaaggggttttgtgccaaaaaataggaatcaaggaagtaacatttgaatttgatcttagggaatggatgtaccttaaacaagtagccctgtatggagaagaggagagagggaacgataatgaagaacagagacgtggaggccggaagatgccagctctaccagaaaaagtagcaaaagtcaatgtgattgaagtagggggagtgcgggagcagggagggtgtgattgatgcctggcagctgcccgtaacgtatgatgcagtatggttttcgcctgatttggggtttccagttctccctggctgctgacggggctccctcaggcacacattaatggattcactcagccagtgatttttctgttttctctttcatttccacttttctatcccatcatggttttctgcataaccccatctgattttagaccaattttgatgtgatttttttcttctacgtgagtggctcagtgaaggctttcgaatactattttcccacttgcatactgtttcagaactgaagaaggtaaaatctaattgtaccaggtttttgaaaagcagtagtttccattgtatgtgtttaaaaagtccccaaaggtctatctgtaagaatctttgaaaagacacattgcagcccaaaccttaggagaaaagaaaaaggggacttcacattgtaaaagcagcatttatctttgcatcttgaagttcctagaataggctcttgcctttataagtggagttttcttgtggcttttgtggggagaattcactagaattagggcagattttctggaaagtcccgaaattcagtgttctgttggatttctggcatctattgagcaagacagttgggataatgagtcttggtattaaatgtattctacgggagggaggagagagaagtgggaggaaggtgtatccgtcttgctggcttcctgcagcttaagtaggaggaagaaaaggagagggtgtgagtagatgacccaagccctggactaagccctttaggtacatgatctcatttaatccccttttcagaggaaactgcctgagatatgtttgacccaggctttgtgctcttagccactaaatggcttccctttactgatgattttactctgcctttatcctatagttacttataggcagctatatttacttcctccaaatagattaactctttgtacctggtacctggaataagtcctgtgtaatcctaaacgctcaataaatatttcttaaaatgaagataattctccttgacagaaaattgatcttactgagcatatatccactgagaaaacagacgtatgaatgtttaatactccctgattatcgtatgctttcttatttaagcagaagtattaaacgcatgccaaaggctcacataaatgatttattatgcaccaattaacgttatctgagccatggtttttctttgttgttatgaattgagcattgacagcaaggcagcactcatttaccttttgtttctatgcagaaaacatttcaaataggcaactgttgtctctcctgagtagtctgagaaatgtgaatggagacatttgtattaggtgtccatctcgtgaccaatatgctttgtacttttgaagtttgctttatccttaagattgtgagaactgtaaatctgccactggaaccatccctgcagattgtcataatgtgatcagctctaaaaagcttcctgctttttagagtgtgtacccttaaggataacaatcatatagataaccttttagatgtcaacacaggcgatctttttatgtgttttattcatgatgcaatttacagtacttaaaggaaaaaaaatccagaagccttacaaggtctttaataagtacaaatatagattgctataggtagaaagtatgctttaaagcaaacttttttacaccattttctgaggcttttattaattactctgttttccagcgaggctttttcatagggatatgcacctgactaacttattaaaagtaaattgcctttgtggtcttattttcagggcgtggtgctgaagttagaaggcgattgggcagttttgttttctacagagaaaacacaatctgggaagagatcttaattgacctattagctgaattgaggagatgaattagttgtagaaaatttgtcaaagttaaataatagcagtgagtttgaaggggtgagctagcagaactagaagagaaaggagaatgagaagtaactcacaggccagctgcataatgggtagagcgagctataggtgaactgtgagtagctggcttgctctgttggctgaattccttgaaaagaaaggatgagacatttttactccagtaaatcttatgtgtatctcttgtggattgaagaaattattgactcaatatgatttaagttagagacaaagcacactcacaaaattccaaaatcagtcttttaaaaaaagcacttcatagtgagcaaattttaaattaaatcatcatctaaattgtgacatgcattgagaggaacaggtgaggtttttactccacgttggtctccatgtaacaataattttcatgtcaaaatgatcttttcaggttttcaggttgccctcttcccctctcctttctgttttcagataattggatgaaagtaaaatcttttgaaaacattgctttcagcgtgccaaaagcaaggcatttataactggcctcaatttgcaaacaatttaggagtttgataagtttctaacaggaccatggtgagttcacaaaatctgatttctttaatggaaacaaaaagtgtgctttgtggaagttgatgttaggaattacaaagaaacccactgttcagcacaagtgcgcaggcctttggccaagaattcctcagcttggaacctgagctaagaaaaagcccctggtcacacctgtggataaaagacttagtgagagctgggaggacaggtgaaaaatgatggtttggaagccagagactgttaaatagaagtgacagaggtgagagaggtatccaggaaaagccactgctgtacctaaaacagtagttaaaaggaattaaaaatgtaaagtcttagacgtttggaactctgctatttctgtacctttctaaatgatcttctcagcccttcagagtctgttacactgttgcattctaaaagatggtcttgatagtaaatggggtaaaatggtctcatcaggtctatttttctctcctggttaaatgtctacttaggttaaataaaagctgtcctgttgtagtcaaaacaattagttcctggcctcataagaccaggtttgaatctgagctgtgtttttgctggctttatggtattgggcaagttggcaatgttcaacttaattatgtcttctcatttgctaaatggataccaatttatgagactatgctcacaaacctaaagtgaacaggtgaaagaccctctgcaaaatagctgctcaataaactgttgcatgctaatcctaaataagcacttaagaggtatcagttacaatgaattccctgtgtttataaaataacttacaggtgcagttcctcttcatagggagtaacatgaatgagtaacatcacatcaccatactgttctgagaggtacttggcagattggtcaatactgtgaactcagaactccaaccgtgggatcccagccatccattcagtggcatttctaccagaacatctgtgtaagagattgaaggttaattttggcaattcttaccttgtacagaattctgtgcattttaagttaaattactgtaggtgattggggattttgaaaatctaggctcaattgttgacaattccagtgacctttggtctggagcaaatcccttagcctatatatatacacacatatatgtgtgtgtgtgtgtgtttatctatatgtgtgtgtatatatgtgtgtgtgtgtgtgtgtatatgtatatatatatatatatatatatttttttttttttttttttttttttggagacagggtctctgtcacccaggctggagtgcagtggtgcgatctcgactcaaggcaacctccatctcccaggctcaagtgatcctcccacctcagcctcctgagtagctgggactacaggcatacaccaccacatccggctaatttttgtatttttttgtagagacgggattgcgctatgttgtccaggctggtctcgaactcctgagctcaagtaatctgcccaccccagcctcccaaagtgctgagattacaggcataagccaccatgcctggtctcttagcctgcatatttcatgtttctcgttcataatataaagacagaaaaggtgcttcctatgggaagatagatgtggacacaatttcacaaattaagttttatacaaatgtaaagtactgcaattcatgttgacctctcagcttagttggttttagagtaaaggggttagctagaggcctgagtcttgctccctggcctggcccaaattacctgacccaggagacatctcaacctctctagcttttagtttcgtaatctgtagatcgtgaggggggttgactccatgattccgtgagctttcttctcaaacatctcattctagaatattccatcggtccttttctgtcaccttcttcccaagtggttgtgaaagggtggcttgtaggcattaggccagagctgtgtgttagccataattcagataatacagcttataattcagcttgtgttgatcagaaactctgcctaagggaaggcccaggtaaaacctgtaaagtcctggagtttcatcacagatgatgctattgcagagcctccaagattttgcctcttttttatgagctttggtgactaccccagcctaatgaggtccaagatatcccagtacttccacgggaggatcatgtgaagattgctgtctggttccaaaattccctcctaaaacagcaagggtggcacctggggaggaggagggacctgggggaggaggagggacctgtgagaggggtatcagtgattctgcaggtgattcctcctcttcctgtcctcttattaaaattccctgaggctgacttcagctagatgttgatcagattaaagcagttggtgctgggatggattaataagcttgaaattttttaacttggatgccttgaggtacttatttcatccccaagcattttccatctctatcccaactagtccagtaaaacctgtggcattgctgagcaataagcaatgcacctgcccgttttcactattggatctggctctgtccactcttttctgggagaacagaggggatgggtggcgtgatggcccactgagtgctgggcttctccatcctccatctgagttggctgcattcctgtcccaggtgtcctctgcctctgttgagcccctgccactgctacctccaagtgtccttccttccctccacatgcagaatggagctttccatccccaaagaactcgagcagcctgtttgcatcactgccaggagacctgtttggtactgccaagcactgcaggtatttctagctcagttgtcttatcattagggtgaacatatttatcctctaaaccaggacacttttgaaagtgaagggaggagagccattaataattaagctgggacaacagtcataaaccaggattgtctgggcagactcaaacatgtggtcgccctacttgttccctgtacttgatggaagccttcctgacggtaaggacagtccttccacatcccctcaacctccacagtggcacagacataattatattgaatgaagcgataaataaagctattttgatactttttttttttttttttttttgagatggagtcttgctctgtcgcccaggctggagtgcagtggcatgatctcggcttactgcaacctctgcctcccgggttcaagcaattttcctgcctcagcctctggagtagctgggactacgggtgcacaccaccatagctggctattttgataagctttaatgacagggatggcgaacagtggttaacagttagtgaggcattgccaggtgcagtatgtgaggtcagcactttgtataattatttaatcttcacaatagcgctatagatttgatactattttttttcttttcttttcttttttttttttttttttttgagacagggtctcactctgtcgcccaagatgcgtgtagtggtgtgatcataggtcactgcaacctggaactcccaggctcaagcaatccttccacctcagactcccaagtagctgggactacaggtgcatgccaccatgcctggctaacattttatgttttgtagagacggggtctcattatgttgcccaggctggtcttgaactcctggactcaagcgatccaccactgcccatcctatttttctgtttttcagagaagaatattgatgcctagagaagttaagttgcttgagagcagagagtaagcagcaaagctagggttcaaacccagagtgtaatctcataggtgctgtattatacagataagctagatgcaggggcaggctggtttgtaagagggcatgttgcctgtagcatttctccttagtgaatctccgaaacaaatcacatcctgtttatttccaacaaaagagaacaaatttgggattatatctgattatagcatgcgagtagcaaataagatatgatgtatgtatttttgcagttttttctttccaagttcccccatctttggccaaaatatcacattttaaaccaatgaagagttaaatctagagttaatcacttagcatcagcagtgcagccagaattctcatctcctgattctaaaactgcctgaccctaccctggagtcactgatcaggttgagaggagttcagaatgaagagagaattgtttcaaccacctgttctgcatgagagcctttcaccattttctgtgtgtttgtgaaatgaccattctgaagttcagatccacatataagactcattcaaaatgatcttcctcaatggaaaccgggggtgagatttgaacctgagagagacagtctgctctggttgatgaacagcatagctctggacccagactgcctgggtttacatctcagctctgccacttctaactttgtgattcaggcaaattatttaactcccagtttttttatctgtaacatggggataataacagcataagagcactagccacactggatggctataagattgaaatcaattactatgtgtaaaaatcttagaatagggcctggcataaagcgacactgtgactgttttatctgtaatatatatgttgctttttaaaggccactaggtgatacattagagcaggcagggtgccatcgaatgacccaaccctttgtcatctggcaatattgcctaaaatccagacggtggattttcaccttcaaagtggttctttgggcacaaggcaagtcttccgaaactccctacttgatgcctggcgtattataggcgtctcatattttttgttaaattgaactgaaaaattgaagcgctttgtatctaaacaaatgtagaaaagtgagacgctgtatccagggtctgaagttgaaaagatttaaaatgtggatggaaacttcagggatgggggttgcatgggatgtttgtaattacttatggatgatatgaagatagtacctgctgtattttaccatgtatatgagtctcgtggggacttcatttaaaaatgtgtcttctgcatctgagatcctgactcaggaggtctagatgggacccaggaatctgcactgacacaggcggtctgtgaaccagacttggagaaacactattttagtccagcgtcttggatgcatgagcttatagttccttgacaatggcaaaattagaagtctaactgaaatcacctacaagatgtgcatgtattacatataccattggagacacccactcggagttttcttattgagagaacatttcagttttgatttcataggtaattgggcggtactgatgaatcactagtttttttttaaatgtaagcagtgatacatccacaaacactttcctgagaggtgatagtctcacgcaaaatttaagaaacttttattcttggcttaatctttgtgactgtattttgtgttatgtgtattctttattttgagacatcctgaaatccttaaattttgctcattttcttaaaagccaaatcccacataactatgtaagtatattctttttcagcagttttctctggggagtttcctaaataaatgaattgaatgggggagccatgatgaatgggtcagtatgctcattgcagtgccatctcttaaagggataaactggcagcaatctaaaagggcaacaggccaggcgcagtggctcgcacctgtaatcccagtactttgggaagccgaggcaggcagatcacttgaggtcaggaattcgagaccagcctgcccaacacggtgaaaaccctgcctctactaaaatacaaaaattagccgggcttggtggcgggcacctataatcccagctacttgggaggctgagttccagcagaattgctggaacctgggaggtggaggttgcagtgagtcaagattgcgccactgcactccagcctgggtgacagagtgagactccttctcaaaaaagaggggaacaaagggagagagattgatttatggctcacatgcataataaatatacctaacaattaactatgaaaatgtagtgtatttgctgtcatgaaaagatgtttgataatcatcttttatgtaagtgaacaagcatgttaaagaacacattgtaaaaaaatatcataatacagccagtatttactgagtacttgctatgtggtggacacttggaacgcattatctcatttaatcctcccgtaaacctgtgtgtttaaagtactattatctgtattttctgatgagagacttgtggcccagagagggtaagtgacttgtccaaggtcgtacagcctgtaaatgttccccaaaagcccatgtactttcttcactgtcatgcattactgcacctggggcagtagctacacactttgtttaaagggcctgtatgaataccccaaaatattcatgatatcgattcaagttgtaggagtttggtgatttgattaatttttctttctgcttccctgcattttcttttttcttccaacagccagttattaagtcaaccaacaaataattctaatggcttcctaaatgtagaaagttggttaattttggtattgcttttgccattcagggatttacatagggacaatcacagagatgctaaaccagttaacctttgtaggaaagcggccattaaaaccctccctcctgttttcacgatcactttcatcctaagatcgggtagattacctctgcgtttgtaacatcttcagtattcaaggcttggatgtaggagagaagccagtttaaatggtcctcacttgtttagcacctacttatcaccccgggagcccttagagttaataaggagcccagtgcaccggtgatcagctactttatttccagaagtgggatgtgggggccctgctgctgcagtgggggtttgagggcagctgttcacctgggtgcatgtcctggatctcatgttgggggcggcagtgctcccctggaaggggatgagccagggaggagtccgcaagggaggatgggccagggagggagggctctgaagcacacccttgctccctgggcagggtctgcatccagggctccttccttccgcctggagctttcccatgaatccttcctccaccacctcctcaactagcacctccagctcgccccgcctgacccagctccctcagcccatgtgtccccgctttgccagctcttctgtgtgctaagtggcacggactgctgtctgtggcttcagtccccggtgggggagcgctggggtgttccgcctcctaagagactgttggttgagggcccgcatatctgtttctgggtttggtgctatcaaggtcacacgggtgtcgccccagactcctctgctgcttacagggcctcatgctggcgtcaccatggcatcagcccagcctagtggagacttgctatctgatttccatcatcctccattcccctttgcaccgcagccccctgaattaattaagcaagcaagcaaacaatcaagtcttgttcgacactgttaaagggagcaggcttcctggtctgtggggagctgcaggggagggatgtgatgacttaattacaactgccacttgactgagtgtctgctaagtgcagggtgctgagttgcattcttttttttttttttttttttctttctgagacacggtcttgctctgtcgtccaggctggagcacagtggcttgatcttggctcactgcaacctctgcttcctgggttcaagcagttctcatgtgtcagtctcccgagtagctgggactacaggcacttgccaccatgcctggccaattttttatttgtatttttagtagagatgggatttcaccatgctgcccagggtggtctcaaactcctggcctcaagaaatctgcccgccttggcctctcgaagtgctgggattacaggcatgagacaccgcacccggccttagttgcattctttattctgttgaatctttatccttctgcatggtatgcagccttgaggggggtaatagcttaatgggagaatttatagttttacctgtatattcggtggaagatttcaggtgagcagaagttctgggaggattaagcgtcgagggagatcttgagaatgaacacagttgaaaatgaaatcagtccagttgtaagtaataagtgatcgaggaaaaggaagttccttcacctggttaatgaatatttattgcctgtcacccggaaaaaccctggtctcagaagacttaagggtaccgggtttgtacaacaggcagcttttgcattggacttgctggctgaagccagatacctacatgggctgtatagtgatggatgcttcattcttccttggtctgcttggttggaagtggagtcgatggtgcttctagctgatccccttacctctgaattttgtcccggtagctggtgactccttggtgaagtcagtttaagtctctgggaaaagcatcccatgcatatcatattccaaatgttctgtgtaagccccaggtttctttcacaggccttgtgttattagagttctgggggcagttcttgagggcatgtgtcttttctgccaatatttaaaatagttgttggctttaggcttgttttacacttcaggtcatctacaaaggaaatgttaatttgggggaaaagagatgcaatgaagagataaatatataaagatacagaggctcataaacactctggttcacagctcctggccagccctgtccataggagccatatggacccggcatgtggcttaatcctcgtaagcctgggtccctcagacaactgtgaagggggatattgctacctgcttgctaacatgctgagctgtgaagataactgaggtcatggataatgaagtgctgggcacttgcaaaacatgatttacaatctcagcaaagacttcattgtttattcagtatatatttattgacttccttctgtgtgctgggtacagagccacataccagctctccttggagtgtagtccctgggcaggaagcttcagcctgatggaaacactgtttcctaggtttcctgggccctgctgaagccggctgcatcagaatcttcaggaatcagtgtttaaccaccctcccctgactgatacctagtcatgtttgagaaggccccctggcacagtaggagaggttcagagacaagctaactgctatgggcgaggctggcacaggcagtggaaggtggtagtaaaagaacaggtggtctggcctggcgcggtggctcacgcctgtaatcccagcactttgggagaccaaggcgggtggatcacctgaggtcaggagttcaagaccgggctggccaacatggtaaaaccccatctcttctaaaactacaaaaattatctgggcatggtggtgggcgcctgtaagtccagctacttgggaggctgaggcaggagaatcgcttgaacctgggaggcagagactgcacagaggctgcagtgagccgagatcatgccactgcacttcagcctgggtgacagagcgagactctgtctcaaaaaaaaaaaaattgaataggtcgtctgctgggtgaggacccctccaccccagctctcatcccctggcccgagggttggagcactagacttcatgtaccagttcaggatatgcatatctggggagccgtcctgggcatcggcatctgggagagggggtgaggatgggtgggggtccccatgtaagtcctttcttcaggttgtggcttctgcatagctccttgttgtgtggacctgtgagtacacaccctggaaaggcaagtcaaggcctcctctctgctggtttcaagtggtggagaagccctgcatgactgaggcagagaagatgctggaaactgtggcaccaaaccacctcagagcttgagttcagtcccctgcaaaatcccaaagcctccggatttatttatttatttatttatttatttgagatggagtttcactcttgtcgcccaggctggaatgcaatggcatgatctcagctcactgcaacctctgccttccaggttcaagcgattttcctgcctcagcctcccaagtagctggaattacaggtgtgtgccaccacgcccagctaattttgtatttttagtagagatggggttttgccatgttggccaggctgggctcgaactcttgacctcaggtgatcctcctgcctcagccttccaaagtgctgggattacaggcatgagtcgctgtgtcaggccccaaagcctcaggattttagagcgttgtcaatccccttactctcttggccacctcagaaaaccaagaaacaggaatttacttgtcccaggtctatctggggctgagctaatgcagagcctaggtacacagctgcttttatatatatagatatacgtgtatatatatacatgtatacatgtatatacgtatatatgtatatatataatgcctatattatgtatatataatgcctatattacatatataatatctatattacatatatgtctatattttatatatataatgtctatattatatatatgtctatattatatatataatgtctatattatatatataaaatgtctattatatatatataatgtctatgttatatatatatatatatatatattttttttttttttttttttttgaggcaggacctcactctgtctcccaggctgcaggttgctaattaatttttttcttttaatagagacagattctcactacattgcccaggctggtcttgaactcctggcctcaagtgatcctcccccttcaacctcccaaagtactgggattaggcatgagcccctatccctggcctgctgcttattattgtcattactgttcatcatggtttactgtgaatggataaaagggaaagttaagaaccattgatgggcacattatattgtacccaacatgttaatataaaggttcttctaggctgggtgtggtggcttacgcctgtaatcccagcactttgggaggcccaagtgggtggatcacctgaggtgaggagttcgagaccagcctgggcaacatggcaaaaccctgtctctactaaaaatacaaaaattagctggctgtggtggcgtgtgcctgtagtctcagctactcaggaggctgaggcaggagaatcgcttgaacctggaaggcagtgagctgagattgggccactacactccagcctgggcgacagagcgagactctgtatcaaaaaaatgttcttctgatttttttccctctatcacatatgccatttaaaatataagggatatatggaggtatgattcatgtatcataaaattcaccattttggtggttttttagtattcacggaattgaatgactattcataccatctactttggaacatttttgtcattccagaaagaaaccccagaccccttagcaatcactgtctattctccctctctgtagcccctggcaaccatgaatctactttctgtctctttgaatttgcctagtttgtacacttcatataaatgtaattgagcaggctgggcgtaatgtctcacgcctgtaatcctagcactttgggagaccaaggcgggcaaatcattgaggccaggagttcaagactgtcctgtccaacatggtgtgaaacccggtctctactaaaaatacaaaaattagcctggcgtggtggcacatggctgtaatcccagctacttgggagggtgaggcaggagaaatgcttgaactcaggaggcagaggttgcagtgagccaagatcacaccactacactccaacctaagcgacagagcgagactccatctcaaaaaaaaaaaaaaagtaatgatataatatgtggcttttactgtctggcttctttcacttagcattacatttttaaggttcatttatactgcagaatgaatcagtacttcacccctttttatggcttaatagtaattgattttatttatcagttggtagacagttgagttgtttatactttgactattatgaacagtgctgctgtgaacattcagttgtgcatgagtttttttgtggacgtgtgtgttcattcctctcgggtatatacctaggactgaaattgctggatcatatgttaattctgtggttagcattttaaggaattgccaagctgttttccaaagaagcggccccattttacaatcctaccagcagtatggtagagttcatgtttctccacatcttcaccaacatttattgttcatcctttttatttagtcagcctggtaagaccaatgatgctgagcatcttttcatgtgcttatcagccatatgtgttttggagaaatgtttcttcatattctttgcccattgtttaattgggttgtctttttattgttgagttggaagagttatttatatattctaaacatgaatccctttatcaggtacaggatttgcagataattttctcctattctgtgagttgtcttttagtgatgccctttgaagcttcactaattgtaattttgtaaggaacaaatgtaaattttataccaggctgcactttttgcctgttcggttttggattttcttattgttggtatcattcatgaaagacttagcagcatttcattggttaaagctaacttcaattttgaggaagtccagtttgtctttttttgggaggtcggtcacttatgcttttggcgtcatagccaagaaaccattgccaaatctaaggtcatggatattcctttgttccaagaattttaaagtgttagcaactacacttaggtctgtgatcttttcgagttaatttttgaggtctaatttctattaaaagtgatctttagtcaaggatattgaagtataaagctaaaaaaaaaatagccttgatttttctaaaatggactgtgatactcagctctgtcctgtcaattactagtcacaggatgctaaaattataggtttagttttttaagggaataaataaatgcctcaatctcaaattaattttgctctgaaattgagctgattactaagacgagatccaatttaggaagtgttttgacattacccccagtgagcaatttgagaagcacataagcaaaaataagaaagcattcatgtgggctgcttcatagggtttttttttttttaagtgttgtattcaaccttatgagaaacacttgaaagtatgcaacttgattgtctgcccatacatacatatgttcggatgtgtaggtacaatttctgtagttttactcagggagtaagtgatgtatctcctcaggttcctaataattcccttttcaaaaatgaataaaataatattagatacctcatggggttcttgtgaggattagaaaagtttattaaaagggttggaataaacctgccacttagtaaatgcttataaactgcttactgttattaagtattccatttatttatcctgctatttccagtacattttagccaccagcataatcagtacttctcacttaatgttaaatactgctatatttttgaattattgtataaatatatgctaattatgatttttgcctgcagtaaaggaataataaacagttctcatgaataacttaagtctaataatgtttttattgttttataacatatttttcatctaattgtaattacttaaattcagaaaagcaattgtagaactgggtagcagagtgttttggtgtgttacttgtcctgaatcacgatagtttaaccaatgaaatgatgctagatcttctgtgaatgcacccaaaataaaaagcaaaaccaaatgggcaaaaatacagtctcatataagatttacatttgttccttataaagaatctaaggtatttttcttttttatttttctttttttttttttggagacagggtctctttctgtcactcacgctagagtacagtggcaccatcatagctcactgtagccttgaactcctgggctcaagagatcctcttgcttcagcctccagaatagcagggactacaggtgcaagccaccacgcccagctaagttttatattttttttgtagagctggggtctcgctatgttggctgggctggtctcaaactcttggcctcaagcagtccccctgcctcggcctcccaaagtgctgggattacaagtgtgagccactgtgcctggccaggtgtctactttctctcccagaccaaacaggagaaaagttctgaatttgaaagggaaactcatggagcattttgaagatagctttaggccaattatgagtcagtttttctagcttggagttcaaggagcaaagacggtttgtttggatggatgacctgtggaaggactaaatccacctggtggaaggttcaggatgacaaccccatggacatccaggtagaaatgaaatgaccactgggcatcagcatgagagggagggccatgaagtttaaatttgagaggaggagaaggattggacaatcaaggttgtaaaggtagcttgaggccagtttggacttcattccatatcttgctctattctacaaggagtcagatttgcctatgaatgtacttatgtagcatggagcagcaaaatagatgtggatttgctaacacataaagctaaaatttaatagaccatccccactgtcttccaggttttcaattttactgccctgcttgctggcttctaagaaatagtttagcttcttttaccatcactttttagacattctgtgatttctctctgacctgttgtttccaaagcaacagcatgtggccagtcaaaataggatttcactcttgtttgtggagctctgtagtaattaggaaaggattcgaaactccatttgaaacggaggctggtaatacaatgatgtgttggatgtttctcagtggagaataaggtgctccaaaaccatggcagcaaaatactaaatgttgtgagagagatggtgatgtcttcctctgtttgtcaccattatgggaaacttttagatgtggattaactttgcacagatggagcggtgcaaggcaaggaaggttatcctgggggagctgctttggtggagaaaacctggtgtcctgccaaaccttggccttcagagtgaccctagggctggtcttccacattgtggaagagacagacctgctagtcttgtgatctctactcgggggcaatgcactgaagagaaatgcttttagttttgagtaaagagatagtcattaaatattggcttcagctattatttatttatttagacagagtctcactctgttgcccaggctggagtgcagtggcacaatctcagctcactgcaacttcacctcccaggcttaagcgattctcctgcctcagtctcccgagtagccgggactacaggcgcgtgccaccatgcccggctgatatttgtatttttagtagagatggggtttcaccatgtcagccaggctggtcttgaactcctgacctcaagtgatttgcctgcctcagcctcccaaagtgctgggattacagcaggccactgcgcccagctgccatttatttttatttttataaaaatatgtgtaataataagacagaaaaaatagggagtagacaaaagaagtaacttaaacatagtggttctcaatcagggatgattttgcttcccaggagacacctgacagtgtctggagacattttttattgttatactggggctggagggctgctactggcgtctagtgggtagaggttagggatgctgctcaacatcctgtatgtactggacagacacccccccattaccaccaacaagaaagagtgatccagcccaaaatgccagtagtgccaaggctgagaaattctgcaagaatccacccctaacacataataatcccacccctaattgcgttatgatggtgtattttctttcattattttatttccacattatacgtaactgtgtacttagtttttttgtatctggttctcttcattgagcgttatatcctaacagagtaattttgtaattttcaaaatttttaaaattcacacatttctctcctatactacatacattctaatttactgctgttgtgaataacctgtaatgaataactttgtgtatttggcttttctttttcttttaatttctagttatttcttaagggtagtatttgtaagttgttcatattatttttctaagtggtgaattttttatgattctcgacagatgtttccaagttgctttccaaaggcatggtactaatttcagtgtcatcaacaatgtatagactttctgtttgcttgtgtttttgcctgcataaagcataaagttactggggaaaagcctatttttttttttggctaagtcaatgggcaaaaagtagtatgtgtttgattagtaatgcttttgtgtgggagaaacactgttctgatcattgtcgtcacaaccctcagaagtcatgataaaaccatctgtttctgtttaacaaaggctctgagagttattctaggtcagtggaatgatgcctttctgtacttactgcgaagaagtttattaagataaattgcgatagtttcaactttcttggagtacttttaaaagagcaagatccactcaaatcatcatggaaaatcctgtcaaactctaagaaaattgtctaggaggccgaagtgggtggatcacttgaggtcaggagttcaaaaccagctaggacaacatggtgaaaccccatctctactaaaaatacaaaaattagccgggtgtggtgatgtacgcctgtaatcccagccacttgggaggctgaggcagaatagcttgaacctgggaggcagaggttgtagtgagccgagatggtgccacttcattccagcctgggtgaaagaacaagactctgtctcaaaaaaaaaaaaattgtttttgatgaagccattaatgttatagttaaaatatatttaggtatgctaggactccattgcactttcctattttttatgagttatttgtgtatttaatggggcacctagcactatgacatttcatatatgtagaatatatatatatgcttgacacacggaatgctcagtgaaaatgtattaaatatgaatgaacaaacttctgcccgcactttagggccaagagtataattttctgctgtaatgatgacagagagctatagtggagtgtgaccttttgatgtactgctggtcctgattatagtttacttgactttgaaggcttgatcaggaataaaacctccaattatatcactttttcagtggcaaacctgttttatggagtagtgatttgtcttgcaacagggctttggaaactcattaaaaccagggattttctcgcacatttcctaagagaattacaaatatgaaaagctgtggataaaaattatctgatttttgaagatttgctcatttttagaataaaacgttttcttatattttcatatcatgttttctaaatttttattctttcttgagggaaccattccaagttgtacaagtacgtttctttaaatatttgcatttgacaatgactcccttctctggttcttctaacaccttaaatgacttttttttttttgagacggagtctcgctctgtcgcccaggctggagtgtagtggtgccatctcggctcactgtaagctccacctcccgtgtttatgccattctcctgcctcagcctcccaagtagctgggactacaggtgcccgtcaccacacctggctaattttttttatatttttagtagagacggggtttcactgtgttagccaggatggtctcaatctcctgacctcgtgatccgcccccctcagcctcccaaagtgctgggattacaggtgtgagccactgcacctggctgactgttttaattactagtatgtgtccgtaaatgcctgagcaggggttttgagaactgtgccttcctcttctttgacttttaaaactgatttcttgtgcagtattatctttctgaattatgtagcaattttgctttacccaggattaggtgtgctcctctgggttgggtggttgtgtagtacatcatgtgatcagacagcaggcatggaccaggacggtccctggcaggcactgtgtggggctcaactccttccttcccttgtcttaccttactcactggagcatttgttgctttctctcctctcagcccatcaacctagagttgagtaggaaagagtgcattgaatcaagtatttaaattgctctgatggttttgtatgtgctatagaaggaattcgaagacagtttactttttgtcattttcatgggaatcaagaacctcatttaatcagtagcctggtattagttctaaatcatccacacatagatgtggggtgattttggtcatgttattttatagggcattgcccttctcctccagccaaaatatttgtaatacaaagcccatgattctgtcctctctctgtctctggtttcattgataaacttgtaatattttttataaaaactcttttaaaaattaaaaatagatcctggtatggtggctcacacatggaatcccagcactttgagaggccgcggccagaggattgcttgagcccaggagttttaggccagcctggccaacacagcgagactcttcctgggcaacatagacgctgcctctacaaaataaaaataatacttgatagaaaattcaaacagatggaagggcacaattattttttttccgagacggcatcttgctgtgttgcctaggctgcgtggcgtgatctcagctcactgcaacttctgcctcctggggtcaagcaattctcctgcctcagcctcccaagtagctgggattacaggcactcaccaccacacccagctaattttttgtgttttttagtagagatggggttttgccatgttggccagactggtcttgaactcctgacctcaggcgatccgcccacctcggcctcccaaagtgctgggattacaggtgagagccaccgcgcccagccaggcacagttatttttaagtttcttttcccatgctataggttcattttgcagatgtaaccgcttttgaagtctcgttgtgtcgtttaagaactgcttttgaggtatctctgccctacattatatcatcctacagttctgagacttgcttttttcattaacagtatagatcttggacctctttcaccatcagcacagagacataacttattttgcaattgttcagtagtgcttcgttgtgtggatgtgccaaaatttatttaagcagagcccagttgatgggcatttaagtaaaaaacatgctgtgttttgcctttttaaaacaaagctgcagtgaatatcctttgactgcctggatttgaatcttggctccagcagttgccagttcgtcgactctgatcaagttgctttatctctcatgtctgcaggtttcccctctgtaaaatgggaatattaataatatatgatgggcatgtagaataaaatagccagtgcatatgatacccagaataatgcctgggacacagtgagtgatcagtgatcattagctctgtatggctgcctgtgcctttgcacacttgagagtaagtcagtcaaataaattcctaaatgctgaattgctgggctgctggttcaaaaaatgtacaattcaaattttggtggatactccctgttgccctacacacattataccaagttattcttccactagtaattaaacttttaacctctaaaagccttttttttttcttttaatgtaaggcttgaaagcaagaacattccttcattacttcctcctacttatctttactcttggccttactacgtcatgacacatcttatgaaatactggtgtgataataagcactttgtgcagccctaccatggaagaattggtgaaaatgtaaaggttctcagtggtcttcagacttgtgtttgagtttctctcttgcaacaaggtgcctgactaagagagtaaaggttacttcctgcatgtttaatggggcttgatatttgcatatgggcaggtacatcctgcttaatgaacagtgttgggagccatgtggatgattgacatcaacttgtagtacaacaggaaaacattcctagattaatgttccttttcactgggtagggctagagggcaactgcaacaagtgaaatgctaggctgcaggtagatggcttgtcttgagctatgaataatatgtttggcagcagcatgggcagaaaagttgagatttctggatacaggacctggtgaagcaggttctgtcacagggtcagatcacctctaacacctggccatccccagtgcaaaggaaaactaggagagagagaagtgagtataagaggcagctgagggactcttgacaaagttgagaaggatctggtgtcctgggagagctcctgtcttctggaattagtgatgcatcttttgtggaggctcctgatggctcagtaaaaggggcctttcatcttgcccttcctacagggctgagaggggaggggttcttgggacaagtggcttttagcagagaacaatagaagccataggctgggctgtcacttgctttgctacttcttagtttgtaatcatcctctgtgtgtccctgaaagtcccctggttctctctaaactgtgtggctccaactgaattcctgtctgctccccaggggtgccccgcagcagttagagcagcttgttgagaaggagccgcaggggtagggcagaggtggaccggaagccggaggaggccacttgacatggcgattggagccctcccagcctgtgctttagacctgccagattcctacccacctcaccttggagtgggacatttcttttcacagtgcccaggcttaactatgctgtccccgggtccgttcccaactgttcctattcaagatgtctagacctttgttccctgccttggcattttcctttcctggtgtggagtatctctttttgaaatagctatctcagcttcaacatagcagagcggaaaacctatgtctgggcttgaggcagggggaggaaaccatagatagatccaggaatggccaaagtaagcagagatccgtgagcctggacgtgtcatgacataacaaggatatgtgggtgggaggggcagggatgacatctttagctttctgtgaaatcatagacatgctttcattattttgtagaatcaaataattttgaagatagagatatctgagtccatcgatacttacctctttttttttttctttgggacagagttttgctcttcttgcccagactggagtgtaatggcgccatctcagctcactgcaacctccgcctcccaggttcaagcgattctcttgcttcagcttcccaagtagctgggattacaggtgtgcaccaccacatctggctgattttgtgtttttagtagagacgggatttcaccatgttgattaggctggtctcgaactcttgacctcaagtgatccacccaccttagcctcccaaagtgcttaggattacaggcatgagccactgtgcccagccgatacttagctcttattggccatagttctcttggagaatttggggaaaagtatgggcctctccataccataagtatacatgatgtacttaccaaacacgtgcatgcaagtttaggggttcacaggccctggaggtttgtctgcacatctgcactgtggggcagctgcaccttcctatacacaaagacccagggtcgtggagagagggcacttgtgtgggtcacagagttggagacagtgtaccagaagtcattggtccgcagagccgtgtcttgcattttatactccagtacgttgcttcggtgggaagggtgacctcattttttgtttaattcgaagacctcactgggaaagaaacacatagagatgtggaaggaaaaagaaaaagctgtgggaaatcgtgaattcgtggacattgatggtgaaaggttcatttcaacccttaatgggaacatcgtgattctgtttaagaaacagcatcatgtatatgcctttctaataaaacggcgcggcaccttcccacacaacttgcagccacgaggttaaccagagataaacgtggctttccttttccttacatcttcctgcaacacccttcacaatagcccacaccaagagagttcttagggtaaatatctgtggcgttaaatttcactttaatacagaaaggctggccttgaaggggagggaagagaggagcacgactcacttgggcctcccagaggcaggcttgaggacctctcctgcagcgtagtggatggggaggaacagcactcggggttcaggctgaccgcagctagactcctggggggtctctagctctgtgaccagagtggctctgcctcagtagcctcccctgcataaggacacctttgcagggatatcgtaaggaatggagagactgtattgaaaaatatgccggtagtatctggtttctatggggccctcagatgatggccagcatcgtcttcaacaacatctttcattgtcatcatcattgctgccatcgttgtcctgggccaggatggttggcagtgagggggtctgacatgcccatcgtgctctgtggtgctctggtgctgtttgaaacacgcgactggttcttttagagattggctgaggagcatcaccttttgtgaaccatgctgatcaagttcatctattgtttgatgttggttgagaaaatcattgatcctaacatttcattcttacacatagccttaatgttctttttaagagagagatagaagggctttgcccatgcaaaatgcacacgaataatggcttacccacttgcaaataatccatgtgaaaataagttgcttggaataacataaaatcatgaagaggccaggcgcagtggctcacgcctgtaatcccagcactttgggaggccaaggcgggtggatcacctgaggttgggagttccagaccagcctggccaacatggtgaaaccccgtctctactaaaaatacaaaattagccaggtgtgatggcgcatgcctgtaatcccagctactcggaggctgaggcaggagaatcgcttgaacccagtaggtggagggtgcagtgacctgagattacatccttgtactctagcctgagcaataagagtgaaactcagtctcaaaaaagaaaaaaaaatcatgaagagtggacctttttgcaatttatatatatgttttcctatattctgcgatgcttataatcatgatgtaaactaatccttctttggctgcaatagtcaaaatatagttataggaaataatattgagaagaaaaatatattcctgagctaacaaaaagccatataggaaagaaatgaagtgtgtacagtgggctctcgctcagctttttgttttttaagaaacactccattttaaagagaaaggcccagccatttccacagatgtgtttctctctctgagctgtcagtagcatctgcggttattttctggaaaatggagaggagatgccatgaacttggatttcagagttcccctctgattatcaaattgaccctcttggtgatgaatcccaccattggtccccaaaaggtcataccttagtcactttttaattatgtgacccccatggggtgcacaaaaggagcttcatggggacttcatgggcctctccactgtctgcaacttgaagcctgatttgcaaagccatcggaagagaattccctatggggtgagcagccatagttggcaaacagctccaccaccacagccttggagagggagggccgtgcagactgacccatccaaccaagccaggagtcaacgctggggccatcagcatgcgaagcaaaggaaccaactctgtagcagaggaaactcagcaaccccaaagaactgctgagaagaaatcagaccctcctgaagacttctggtgcagtccactgctggtgtaaagagagattttccattttgacagatcccatggactcatcttcagcaaaccattgggcagggaatcaaaagtcatcataaagacctccgggtatttttctacatcagtcccctgcgtgctgcgagtcctgaaatggagcttggagagcagcgggtgggaggagaaggttgtcgtccctactgtttttgcttggattgttttaccctgtccccacacgtggacagattcagccgggtgcttcaagacatcattcaacttgcatatactttgttcgtttattacacaaatatttactggttgtgatgtgatctttgagtgctccttggttcccccttcctcctcctccaagaaaagatggatgttcctctccttccttacacagctcctcctcacctcccatccaaatgccttatggcatctccagtggtgtcatctgctccacattggccaagggtcggtagggtcaggacagaggcctgttcatcacttcatctgcagcacctaccacagtgcctggaggtggaagcttaaacacttattggataagaagtttccgtagtcctcttactcaaccactagatggtcacttagtagccaaaaccaaaaccaaaaaacaacagttttttactttattggacaagcactgattgagccccttctgtttgttttttcacttcaaaattattttctttcggaaactttcaaacagaaaagttgaaagtacagagcaatgaacacttgggtattcctctgtctggatccagcaactgttaacaactcggcacacccactctgtctatctccctccctcccctgtgtgcacacacacatgtgcacagacacagcctcctcttgcgctagatcatcggaaagtaggcaccccaaccctaaatatttcagtcttaggaataagatacgccattagaaactgtggttacaggccgggcacagtggctcacgcctgtaatcccagcactttgggaggccgaggctggcagatcacagggtcaggagatcgagaccatcctggctgacacggtgaaaccccgtgtctactaaaaatacaaaaaattagccgggtgtgatggcgagcgcctgtagtcccagctacgcaggaggctgaggcaggagaatggtgtgaacccgggaggcggagcttgcagtgagccgaggtcatgccactgcactccagcctgggcgacagagcaagactgtgtctcaacaaaaaaaaaaaaaaaaatgtggttacagaggactacgtgctttgggagtacagagtgggaaaagttactttccaaaaaaaatggaaacaattagaaatggtttctttgagaaggtaacacgtatgctgtgccatttgcatagataccggtttacagtgtttgggtctaaaactttaacaaaagggaaaagataacagtctttcaaaaagcttactatctcctcaaaaaactcattcccctttacagtatttggaggtttgatttttatgattcctctgtggttttgtaataaccacacttattatttccttagcttctcgggctgtcattgaaaaagtgcctttaattttgcttgcatttactagtaagatttattcatgtgcagaggggccgtgtagaccagtgaggtggtgtttagtcagctgcatccgccttgctgtgcgaaatgctggtgaaagctcagtgacttggagcaacaccaaaattcaatttttgcattttaataatagcttaattttgtgattatgcttaacaattctatacatccctaaataaaagaaagtataggccattctaagcagtcagaacttcagctttttctaccatataatggagggttttgctaaatttaaaaatgtgtccttgaagctgaaaggccacctctgaggcactctggggagagtgttcgctttccaacagtcgggaagcaagcaaatggcacacaccctagaccagtgagagaaaggcacttgcaggcctgttaggcattttgttggctaaatagaggggaaatgatggaaaacaaatactgaatattggtttggggagggaatgacaacagcttgtgtgaaacggaggtgattttaaacataagccagtgggtttcagagcacaggctatggtgggaagtggtggggagggggaagcttagcaaatctgggtattggttttgcctgtttttaaaccccctttggagtctagtaaggttaaccactctggttagttcagcgttctaacaggtgactttacattggaggaagatgttcagaaggcgtggaagacacatcttcgagcagccccagcttctgatgattttgttcatctgggttgcagacccaatctgtgtcccagggactgggactggccttcattaccttattgacatgcttctcccggacacacacacacacatcacatttgcagccatctcaatttagtagaggaattacacataaccaaaacactccccaaatgtgtgctggagaacagctcggagggatgggacggcctgtcgtttcctgacgttgactgacttgagtgcaagaccccagagcctgggtgtgtgcagagggcggatagcacatgggtccctgcaggaggcctctcggccttcttccatgtgtgtgcacgtgtgtgtgtgtgtgtgtgtgtgtgtgcgccgtcaaatgttggagcttctggggaccaccccaggaaccctctggacaggggtgtctagcccaggcctgagtgcagcgccctccctgagggtgagggttggcttttaaaagaggatacctttggctgggcgtggtggctcacttctgtaattccagcactttcggaagccaacgtgggcagattacttgaggtcaggagtttgagaccagcctggccaacatggtgaaagcccatctctactaaaaatccaaaaattggcccgggcatggtggcagacgcctgtaatcccacctactcgggagactgaggcacgagaatcgctcgaacctgggaggcggaggttgcagtgaactgagatcacaccaccccattccagtctgggtgacagactgagactgtctcaaaaaaaaagaaagagtgacacatgaaataaggggcaagaggttctgagggagaagccttagaaaaggcagctctgttcttcctagaggagtcttagtttagcattttaccacaaagaaatgtattttttttgaaagcagaggcccacagaagctgtgacatggctaagcttagctgtcccaggccaggatcggaactgggtgctcatctcacacctccacacccagcactagcccaaggtgggacccatgaggtgtgcttgggcacagttagggagaaagtcaggatggattggcaagggaagattcacttccgaagtattggcttagcagaggagctggctcactgggggatgagactcaccgatggcagtgtggttatttatgtataatcttcactcatcatttattccctaatcacgacatcgggcacacctgctgggttctaggtgctgagtatttgacagtggataggacagtgaaatcctgttgtaaaggggcttttcttctgtagtattggggcggatgggacccataataagtaaaccccatgatatatttaggctttgtgtccccacccaaatctcatcttgaattgtaatccccataatccctatgtatcaagggagagacatagtggaggtagttgaatcactggggcaggttcccccatgctgttcttgtgatagtgagttctcacgagatctgatggttctatataaggggctctttccccctgctgggctcttctccttcctgctgccttgtgaagaaggtgccttgcctccccttcgccttctgccatgattgtaagtttcctgaggcctccccagccatgctgaactgtgggtcggttaaactgctttactttataaattaccctggaaagtctcccactgggaaaaataattggaacaggcagcatgactatttttagcattatttcaatatgggtttaaacttttttttaaattgaatattgtaactactaagtttaaacctaaggatatagttgctaagtatagttcttctctcactatgatttaaattatgttataaagaactggcagttctttatagcagtctgaaaatggactaatacaccccacaaaccaacaggaccgtttcagatggtgatgtgaactctaaagaagataaacaatgtgatgatggcttagaacagcagagtggaatggagatccaatgcaagatgtgcaattttaaatattctagtagccacattttgaaaagtaaagagtgagggaaactaacttaatgtaacttataaccggtatgttcataatgttaccattataatatatataaataattgagatattttgcattttctttgcattaagtcttctaaatctggtgtgtattttatacttagagcacacctcaacttggattaaccacatttcacatactcagtaggcacacttggctagtggctttggctagcacagacttagtgcttgggggcggtggtacaggtccactttagattgcatggttatctttaagaaaagtcctgttaactaagcacaaggaacagttcctaccactgatctatgttgtgttttgtttgctgctaatgtgctcatacatcaaggtaaattattattttaatccagatttcagctgattttttaacagcagttttgctgtgtgcacgctgaatgggattctccaaggacaggcaatgagaaatccttcaacattataggaggagacggtggagagagatccttatagtctttgagagaaggctttggggtttccagggcctacattttgtcagagatcttctttcctgtacaggaaagtaggtgttgcaggttccttctttttcactctttccttaattatgggaaggaattccaccaacattgatgtttaacctggaaagtctcccactagggaaaataattggcacaggcagcatgtctgtttttagcattatttcaatatgggtttaactgtttttttttttttaattgaatattgtaactattaagtttaaagctaaggatatggttgctaagtatggttcttctctcacctactcagtctttgggtgggtgaaatgctacttgttgaatgaaattagaataatttccatctgagtttttcaggttcagctgcaaatgcaggagttggtttagagtcagtttatgaaggaagttttggaaaacattagagtattttgtgtgtgtgaaaattagacttgtgggaaggagtgtggtaaaaactgctagcaaacactaggcaaaatttttctaaaaatcatttgccttttccttcacgtgtaaaagtcatatatgttctttggagccaatttgaaagagaataaatcatccataatgccatatctttacagtcttttttttccttgtacctttagatgtgtatttggtaatgtagtttttacatagttttatgctgctttttacacttgtcatgtgtattttcacattttcttattttttcaagaatttagcttttaaatggctgtgtaatatttttccttgtgaatgttctgtcattcattctctctcttttttttttttttttcgtgacagagtctcgctctgttgcccagactggagtacagtggcgcgatctccgctcactgcaacctctgccttctgggttcaagtgattctcctgcctcagcctccaaagtagctgagattacaggcacccgccaccatgcctcgccctgtcattaatttaatctttaattcaccctctattgttgttttttatttttcattattataagtaatgctgccatgaatacctttctacatacatatttatatgaatatctaattattgcagtaaaaactagtagaagcaatcattcagtcaaacaatcaagacttttttttttttttttttttttttttgagacagagtctgtctctgtcacccgggctggagtgtggtggcacaatcttggctcactgtaacctctgcctcccaggttcaagcgattctcctgcctcagcctcccgagtagctggggctacaggtgcctgccaccatgcccagctaatttttgtatttttggtagagacagggtttctccatgttgccaggctggtctcgaactcctgacctcaggtgatccacctccctcagcctcccaaagtgctgggattacaggcatgagccagcatgcccggccccagtgtagactttttttttttttttttttttttagggcttttgatatttgttgccaagttaccctctaaaaacctagtgcaagattacattttcacccctggggtgtgagtgccttttgccccacagtctagaccatgctggatttataattttaagggaatttattaatttgatagatggtggatgtgtcattttgatgcaggactttaaggaagaaaagatatatctttaaaaacgttttctgtttttcttttttagcttgtcttttggagttcttgcctttgacttaagggcaaatgtcttactgagagatgctgggtgcctgggtcacaggtggtttgtcgttgccctttttctttttttttccaactcagctaagttcagcactagttttgtgacttattacacagaagacttgaatacatcaagggcctctagagatttgtggtaacatcaagacgtgtagtctgtaatgtgtcatggggtgtgtgagccattcaaggggagttactcttaatggtaccattattcaggatacagtgctgatgcctgcatcctgatggcaccactgtcgtccaactctgtttgtgacattgttcatggcctctgcagagtcagggagctcctcaggataaggctctgtgacatcgtctaaactccaaagaagtagagccatcatatttccttccccaagggagctggcatctaccatcactgaggattttttgagtctctgtaccaggacatggacctcaactctttatttccatgattaatccctatgtcaatgtacatggcaaatgctagcatttccttcattttattgatgatagaatcaaaactcagagtgtttaggtaatttccttgaaattacacagccaggaatggccaaggctgggaattgaatggactccagaacccatggtcgaagtccaagctcaatatctctgagacctggaaggaaatgaaacagactaaaatcagagtaacgcttaaaaccatgaagattccagcccacagattctatctgccacatgcagacacgatttatacccctagagggaaactgaagaaacaaggtggtggtcatacaataatagactcaaaacccaaccacacttttgaagtgaatagtggctcatgatggctttaaacatcttaggagaaaaatcaaagttggtgatgggctaatttggaagattagctgaaaaagttaagtggcaaagaactaagtgatagttggagtgaggaaggcattttggtgtggagagagtaagattggggaaggaaagctccctgggtaactgtaggattagaagctgtgaggagtgtggtttaatcagacaatttggaagcaagacagagagggaacagtccccatttggagagtgttagtgttcagggtaatcagaaaggaagagtcggaagcatatgtaattaatgaacgagaaaggcagatggatgatggggaggtgggtggcgtcgcgctactcatatgttcttttgataagtaaaattatagcataatttctcactcattggaaacaaggttatgcaattaggatcctgctgctgctaaaagcttccagagattttagtgcactgggcagacagagtgatgatgtttactttaaaaatcgaacttctcgtttgagagacttaattttatttaatgctcgatttttgtatttactggttctgcattttctcatgtagattaagatccaatttagagaagaaatatatgggcagtttggctgtagaaagcacagaggaatgatgctgtggatattgatgcaccatgtggtagacagcattttcttttcttttcttttcttttcttttttttttttttttgagacagggccttgctctgtcttccgggctggagtacagtggtgcgatcgtggctcgctgtaccctcaacctcctgggctcagttgatcctcccatctcagccttccaagtagtgggacaccatgcccggctaatttttgtatttttttgtagaagatgggatttcgccccattgtctggtcttgaactcctgagctcaagtgatccgcccacattggcttctcagagtgctgggattacctggctgacagcatttgttttaaagcagtaaatgaaaatttgggtattccttttaagtttttcaaaatttcaatctgcagtttttaatctatacaaaaaactgtggtaaaagacgcctaacataaaaattacaatcttaaccacttgcaagcctacagtttggtagtgttaagtagattcaccttttgaaacagacctccagaactttttcatcttgcaaaactgaaactgtttgcctatcaaacaacagctcttggtttcctcttcctcctaggctttggcagttactattctactttgtttctatgaatttgactgctttaactaactcataaatggactcatacagtatttgtctttttgtgattcgcttgtttcacttagcgtactatcctccaggctcacccacattgtagcatgtgacaggcttcctttccttttcagggctgaataatataacattatatatatggatatgtacattgaatatcccttatctgaaatgcttgggatcagaaatggttcagattggggatttttttagattttggaatatttgcataattcttccaggttgagcatccctaatccagaaatctgaaatgctctaatgagcatttccttgagcatcatgttggtacttaaaaagtttcgaattttggagcatttcagatttcagatttttgtgttagggatcttcaacatcattctatttttttaatctgtcaatgaataaaattacagttttaaccacttgtacacatacggtttggtagtagtgttaagtatattcacctttttttgttgttgtttgagatggagtctagctctgtcgcccaggctggagtgcagtggcacagtctcggctcactgcaacctccacctcatgggttcaggcaattctcgtgccttagccacctgagtagctgggactacaggtgcgtgccaccacgctcagctaatttttgcatttttagtagagatgcggttttgccatgttggccaggctggtctcaaactcctgacctcaagtgatccccccgccttggcctccccaagtgctgggattacaggtatgagcaaccatgcctgggttaactatagtcaccttttgaaacagacctccagaacttttcgtcttgcaaaactgaaactgtctgcctatcaaacaacaactcttcgttgcttccacctcttggctactcttgagtagtgtggctatgaacacgggtgtacaaatatttctgagaccctgctttcaattctttaggatagatagccagaattgagattgctggattacatgatggttctatttaattttttgaggggcttctgtacaattttccattgtggttacaaccattttacagtctaagcaacagtgcacaaaggttccaatttctctgcatcattgccaacaccttttagaaacagtagccatcctaatgggcatgaagactatctatagtttattatgtcaagcttttcttcatggttataaacgaatattgtgatgagtgatttatctatgtttgctgctttactccccaggggaggatgagtataccatatatgtccatattgatacctatctcagaatactggttgtacaaaactattccaggcattgttcttctttaagtatttggggtgtttctttttgcttataatttagtacaaatgttctcagttcagttaataatgagtcctactgtgtggcagttgagaacatgaagataaccagaacacagttcccgccctcaagggactgatgagaagtagccacgttttgtaggaacgggcaaatgaagtggcaaaggaaggtggccatgggttgccataggagcgcaggtgagggatgaggaaaggaagcactaaaccaggtcagcttgtgacgtgggataaagaaggcttcttgcaggtaaagccagagctgaatttggaagatggtaggagttcacctgctaacctgggaggtgtgagtggagtgcctgcgtctggacccactttgagcaattggaaagcctgtataggaaaccataggtgacatgatgccaagtggacatgacattcagggagatgataggcagaaggtgaggccaaagaagttggctggatgtatgtcagagaacgtggtttttatgcagtcattgatggaaagctcatgacgcattcagtgatgtggacggctttgtgctctctgcagaccactctgagggcagtgtggaggtggaggcagagagattaggtaagaggtttttgtgaaagttcaagtgagataaggaatgaactagggcagtggtagtaagaatgaggagaagggagaaaacctgccaaatacttaaaaaaattagcagccatatgccggttaagtgtatgagtggtgagacagagggaacattgaagataacccacagatttctggcagtggttccgtgatctgaaattaggaatataagaatagacactgagggtggacaggatcaattcccttttggacattttgggtttgatgtgtctgtagaagacacaaatggtgatgtccagttcaccttgggtttgtgagtcaaatttgacagattcagatagagacacactcttggttcttattagatgtatgcagtagttaaaactatgaaagcagatccatcccctatgttggaggggcacaaagaaaaggagcagcccaccaaggagctggagaatgagaatcggggtggaccaagagggagtcgtgtctcaggggctggggaaagtagaaaggttccagaatgagtgagtggtcaggaacttcagatgtagcaaaagaggtcttagaatgtaaagatggagtcacttggcagtgtcaagatacaaagactgaataagtttggcagcgtggagataccaggccgtgtgaagatccttaggacctttgtccaggcggttttaggagcttggtggttgtgggaaactaatttcaggtaaatgtttataatggcagtagagtgactatggagtactccttcaggaaacttagaaggaaagagagaaaagtgaaaaagaggccaagaaattttttttttttttttttttttaaagaatatgagagacttgagcatgttacagggcaagggaagaggttgttgataattaaagtagctggcattttggagggcttgctccatatcacctacatccaacagctgtatatcaaagagctcatcaaatccatccaacaagtctgaggtgttgggacaattactgttcccagtgttatgaatgagaaactgaggtacaaggatgtcaagtggctctgggtgacaccagcaataagagagcccagtttctcataacctgtgtagatgtcaccatttaccagagcactgagatgtttgctggttttgagggagaagttgaagatttagggtaaagaaggaataattcatagaaccaagttctagaagacactggaagagatgggctgaaagctttgtgaaatttgtttttttaaatgaagatgaaaagtttaatcataagggaaaaatagggacagtaaacagagttggatagagaaagctcctaaatattggagcctgtcctggctctgcctcctgcaagaacagtggttttggtttcttttctgcacaaggtggtccttttagtcacatttattgattgattggtttctttattatcacggtttgagctgtcattgagtatgtgacattctgttattttaacagtgttatattaagaatctactctatgtttgggttattttcagtccagtgacttaaatgatagcatgccctccattcttggtgacttgtgttgagaaatcttatgctggggacatattgaaattgttgcaatgtggtttaatattacatgttttaaaagctaagaagctcctattagtctctgaaatatacctggtttccaatttagtctacaaaggagatatcattcctgaccctgatttagtgggagagacagagatgcctatatattggatgatgtattattccatacacacctacatacacagctctgtaatgtttaggaggcttcaacaatgggcagatagaaacctgcagctcctattgcattatagctcctaaataaggtgctagcatgattatttgtgaatttaccctgtgagctataattcaaatccttggccaatcaaagggaaaaataaatcactgggagtagtgttttacttaaaacccattaaagcaatttaagtgaaagtttttttcaggtatgaatacctagctccctgcaggagggcaaatgttgatgtagggatatctttattaatagtcttggtgaaactgaaggagaaggcatacaatacagtctttcacagaactcagcagtagccataaatccatttatgaacagttcaagtaatagagctttgaagcataacattagttttcaataatgatgttattcttttaaaaaatcagaggtttaaatgtaatgcatggggaaatggggcataataaatttgaataagtaagcattacttttcagtggatccagcagattcccttattattttatttattgttcaggttgttgaattttgtttattcaaatagtaaatgagacatagtccagggaagagccctttgcttatgctatatgatttaaggccagctgccgtttttcctgagctacatacgcttcatcatgttggaggaatcaacttcaaaagtcagctggctgttctgcagacaagcaccagacttgttattcaccctgaatcctcagccttagctccccaatctctgttgcacagaaaactacaattcctgggtgcctggaaagagagggacaaatattaatttgcatgacagtatcctgtgcaggacctcgtgctaggagaagcccaggaaatgtttgttggtagttttcactttgtcttgctagaaaagcctctacaggaaatctcctctgcttctaggaacgtcaaatttcaaataatcctggccaagtagctggttcctattcttgactccttcatgggggcggcggaggggaaagcttcctatgataatacattgcagcattacgctgcccaaagtgccaagggcggttgggtactattcttagtgtttatgtctttagttcttgttcttttacttacttatttttggcagattactgtttacaagcctcaggaagttagcagcaagcttgtcccttagtccttagcaataacgtttgagaattgctggaacctgtttgtcttgttagcaactacccaaatacgaagaagcaaggctgcaaggcaagcaccaaacttgttattcaccccgaatcttctgccttggctccgcagtctctgttccacacactcccatgctggctgctggaaaggatggtaggcctttttttttttttttttttttttttttgagacagcgtttcactctagtgcaggctggagtgcagtggcacgatctcggctcactgcaacctctgtctcctgggttcaagcatttctcctgcctcagcctcctgagtagctgagattacaggcgcacgccaccacgcccggctaatttttgtgtttttagtagagacggggtttcaccatgttggccaggctgatctcaaactcctgacctcaagtgatccactcacctcggcctcccaaagtgctgggattacaggtgtgagccactgcgcccggccaagagaggggtaggcctttttgatgggatggaaactgctcttcctgggatttcagcccgcccctatctctcccatcaggagagaaggcagagcacagtgattgtccatgggctggtctctgttcacttccccaaggtgccgacactgcgtgcactccacacgtgaggcaggtgtgggaatgaagctgcctgaaggccgtggggatttcacagctggtgaacctgctgtccctgaagtgccattacttaaacccagagttttctgctcacttctcattttattgaaaatggtgcattggcaaagtgatgttgaactggaactgacaaccagcattgtccctctgctttcctcagactaatccacgggctgtccactcccctgtgatgctctctggatcgggtccagcccttgctttccttggaaaacactacctatatttagtggtaccactagatcttctagcatccgttttctgttgctgcatattcattaataatagggagaagaaaaaaaccaacccttgtgtaattgctatttgaatttcacagatagagtagacatttaaagatttagttggctttaaaatgtaaatttagaagttcctggtaggcaaagcatgtttctctaagggtttataatccaatcattcaatccctattcctttacatgaaaaattaatcctttccaataggtacaaatgcctgaatggagaagatggaaggttcttggcagatggctatctgtgctcttcattggcaattttttttttaacttgaaaaagtcaagcattttggtaggagaatatgctttgctggactctgccaagtttcttgtggctgtgttcctattagtgggcttcaggggcttcctgtggacaattattatggttggtgtggaggaaaaatggaatacattattttcatcttttcattaaaaaatgtggcttccttcccttttctccagccagctgtcagatttgaatgcctgccctagtttgctctgtcatcatcgagttagtgggttgagtgatgggagctggcagaagcccattagaatgattgccagtttccaaacacaccccgaatcccttgctacagatgtctaggaagacgggataacagaaatttgcctctgggtttcagtacattgatttcttgctcattttaattacaggtctcccattaaagaacggggtgggggagggaaagcagctttgaattaaaaatgtgacttatttatgggtttagttgctttactatgaagacttgctctaaaaagaaagtttcattggatgctcttaaagttctttataaaaagatccccattgtacagatgctgacaacattccatgaacaaaaggcttatctggatcacctaaaggtctgtctggaatccaaaataaaactggtgcccaggtggctaattatcactttctgtatcatgcctggaaaatacacagcctcctttgccaagagtctatggcagggcagaaaacgctgcccaggcagcttcatgtagcattgtagcttttccaggttttttttttttttttttttttttttttttttttttaaatgtcatagaaaagataccggtggatatgaatcctttgtgctgaagttggatggcagttagaacttaaaatttaaagaatgcattcgatcagttgggctaatccgtttgggtggttggagcctgataccaggtaggtaaaattacacagccatctactttcattcttttccacccatttgccatgccctgcactgtctgccaggtgagagagggatgtcagcttagtgcagagttttaccacacctggagaaaagagctcctgtctgcttctaagggactgcgaattgctggcaacttcttgatctgtagaggacacttcctttccaggaaatctaattttgagaaaacgattgcacttctaaagaggtctttcccgtgtgatctctagacactcttcgttgctttaaaatgaaagcctgggttttaatatttttacatcattgcatagattcagagcaactaatattttgcttgttcagtggacaccttgttgaagtatgagtaaatttatgaattgtagtgtttagccaacctttttttttttcccattggttttatccgtcttaaaaaggtttggatctgtgccccacccaaatctcatgtggaactgtgatccgcagtgttggaggtggggcctggtgggaggtgatcagatcatgggggcggatcctttgtggatggtttagcaccatcaccttgggctgttactgtgatagtgagttctcggggatctggtggtttaaaagtgtgtagaatcttcccctgacacttgtgcctacaagaaagcttgctccggctttgctttctgccatgattgtaagttttctgaggcctccccagaagccaagcggaagccactgtgcttcctggacagcctgcagtaccgtgagccagttaaacctcttttctttataaattacctagtcacaggtatttctttacagcagtgtgaaaatggactaatgcaccatctatgcattatttatttggacctaaatatatcccaggaattgtgctagactgaaaatatagtttgtatatgcacatttgaagttcatgtgattctgctactctgaaaaatgttttgcattttttgtttaaaaaaaaaaagtagatttccttttctttacagttaaattagcatattagtttaaaaaagtgttgtattttatggttcattaacagaattttacgattttctaacttgccaaggattatggtgtttattcttgaacattgcaagccccattgaaagtttggatgtaacataggtatagatttttatgtgtgtttcttagaaataacagataagcagtttaaaatcattgcttccataaaagctgaaattcgtctttttgaaataggttgggtaaggatttgagcatttatgtaatttgttgttggaaccacccatcctccatggaggttatgctcaattacgtattataaaaattggcattgacactaattcactttctgtatctcttttggatagatggatgatatacagcataagaaagatttactggaaaagatgctgtaatcaaaataggttgtccaaggcaactataggttgatagcgtgttatttgcagataaactgaaattttgaaagaaagaatatttggaaggaaaagaatttcaatccgattatccagtgtttttagaccttctggctatgagattgaattgactatatttcattgactgttaattaattagtacctttgtaatggtataatttagagaactgcattttagggcattactttagtctcaaggttgtcaaatattgtaacttgagctttgaaaactagtttgtaaaaatgagggaatacatttaatccatgtcaactaatttgaatcaatgacataaaatacagcttgggcattaaagcaccgtgtatatgtttgcgtgtgcttgtctaactgggactgtctatgtcaatcttctgttaccttatgcgttgtttggtttatctagctttttaaaaaattggttatagtcttacttcatgcatttttagcacaaatcttcatttcattttaccttcaccagtaataagagcagaaaaagaggtcagcaacaaataatttgctgctcattagttgagttgatgtgtgggaagtatagcacttttgattgaaatggtggttgtcggccgggcgcggtggcttgcacctgtaatcccaacactttgggaggccgaggtgggcggatcacaaggctaggagttcaagaccagcctggccaacacgatgaaaccctgtctctactaaaaatacaaaaattagccgggcgtggtggtgtgcgcctgtaatcccagctacttaggaggctgaggcaggagaatcgcttgaacccgggaggcggaggttgcagtgagctgagatcacgtcatcgcactccctccccagtctcaaaaaaaaaaaaaaaaaaaaaagaagaagaataaatagtggttgtcagttatcagaaaaccttaactttttggtaagtttttgagttacctcttgtaagtaaaggcttgagggagtttaggaagcactgtgacgtccactcatgaaagacagaatataccagggctgggatgggatggaggcagggggtgaataagacttaggggttcgttctccctttctcctcaggttcacttgttgaaagtcttggatgcttctgtgaggccttagggggtaccatgtctaacttgtgccttctctatttttgcatacaaggcaggtgacacctccttgtcttggactcctgtggaccatgtctgttccattgatgaattagcatttatgatagattatttttctagggatggaaaaacttaggaaagccaatgcctgttgcctgcattagtatacctgatagctctgtacaatatatgctgtcactctctcagatggattggaagtattagaaactatcaacctctcaaaattctgtatttgaaaatagtcttgtattttagatagataaaatcagaagtcttcaatattctgagagctccacatagaaatcagactcagggctgggcgcggtggctcacgcctgtaatcccagcactttgggaggccgaggtgggcggatcacaaggtcaggagatcgagaccatcctggttaacacggtgaaaccccgtctccactaaaaagtacgaaaaaattagccagacgtggtggcaggcgcctgtgtcccagctgagacaggagaatgtcatgaacctgggaggtggagcttgcagtgagccgagatcacgccactgcactccagcctgggcgacagagtgagactccgtctcaaagaataaataaataaataaaagagaagaaatcagactcagttagtagatcgtgctggtctgtcatcatctactttgttcactcgttcgtttgtgtgttcattcctttgttcaataaacaagtaccagctgttggcctcctagtgccaggtgctatgccaggcttggagtgaaggtgaggactggttcaatatctccccagtccctttcactaaactttatagcaaatatattaatggatttctaccttgggaatctctctttaattttataggtgataccaacagagattttttttttttgattaatgatttttttgtttgtgttttcattatttggggatgctttttcctatttatatgaggaatatttgtacatgatgaatactgtgaacactgcaaaaagatttcccatgaatgaactcacaaatggaaactcagacgtggctggtctgtgttgcttgtcactgaaaactggactaagtcattatagcttttccttgtttgagggatcttttgcagttgctgaaactgctaaataaacacttcaatataagaaaattacaccttagcttaaaaaatattgttatttttggtttctgagagcagttatataaatttccttccaattcattgacattgttaggtagttgaactttttgtttgtttgtttgtttgagacagagtctcactctgttactcaggctggagtgtggtggcgcgatctcggctcactgcaacctccacctcccaggttcaagcgattctcctgcctcagcctcccgagtagctgggactacaggcatataccaccacgcctggctaatttttgtatttttagtagagacagggttttaccatgttggccagactggtctcaaactcctgacctcaggcgatccgcccaccttggcctcccaaagtgctgggattacaggcgtgagccaccttgcccagccaggtagttgaacttttgaacttaaccagtaaattactttttcatgtgtgcgctctactctggacaggagtttgcttttgctttgccttagagatgcccttacccacccacagagcctgagtgagctgatctgtgcatagacttagtattttccatgtttgataattgtatatattctctgttaattctgtttttgttttgtttgttttgttttggggacagggtcttgccctgtcgcccaggctgaagtgcagtggtgcagtcatggctcactgcagcctcaacctcctgggctcaagcgatcctcctaccttagcctcctaagtagttgagagtatagttgtgcccctgtagcaccaacatctggctttttttttttttttttaagatagattctttctatgttatccaggctggtcttgaattcctggggtcaaaggatcctgccaaagtgctgggattacaggcatgagccactgcgcgcagccatgcttgcaaattcttaagtctttaaaaacagcagtctttggtcttttagacacacttagatgttttgagattatctgtgtacttattgttttgttaaaaaaacaaaaaaccatgaaaacccatcctgaagttttagtttgcctgccctctgggacagctattctcaaggcatggtctgtggactgccgggagtctacaagaccagagggtctttaaggccaaaccacttttcatggtagtacttagatgcttttgttgttttcactgttgacagttgcccgaatggtgcaaaagcagaggtggacgaaactgcttgtgtcttggtgtgagtcaaggcagtggcacagccactagcggccgtcctgatcttcccctcccaccaagtgcagtaataaaggaaaagagtcagtttcacttgagagtggccttgatgaagcagtattaatgtcattaaaccctgactgggctgcagggattcttgtctgagcaatgggccggccgcctactttctggtaatttttgagaatattaaaaaaaccttactttttattactttttaaaaatattctttgtaataaaatgagaagtatggataaagtgcctctggacactgagagatcattatttttcaggaaaaaaaatcttttttttttttttttgagtaatgaatggaactagccactattttcatggaacatcacttttacttagtttaattaattaatttacttaagactgggtcttgttccatcacccaggctggagtgcagtggcacgatcactgctcactgcagccttgacttcctgagctcaggtgatcctcccacctcagcctcccaaggcacacaccaccacatccagttgatttttgtatttttgggagagacggtgtttctccatattggccaggctggtttcgaactcctgagctcaagtcgtccaccaggcttggccttctgaagtgctgggattacaagcgtgagccactgcacctggcctatttttaaaatttctatttatttatttacttttgcacttttacttaaaagagcgactgacaaatcagtttttcagacttgggcatttgtcagacgttttctttaaaatgaataaagttaaggtgtcacttcaagggaaataaccctgagtatttgtcctgagccccaagtttgtgaacatctgcccttggaaaatgggagagtccacactaggagctgcagggacccatttgccccacaaacttctgcaggggtttatgtctgagctatgtgccacctgctttctggtgtccttcctttgtgaatttcccaagcgcttttgacttactttagtagcgagatggctgtgttctgggtttgggttagtagtttcatgaagatacaccacccttcctcttcctctgatctgtaagagataggaaaaaaccaaagtgtttttcctattctaatccagatcacttcctccatggtctctaaaacgtgaggatttctccacaccagcagccaatccgttccccagcagataccagccattagagatgggaagaaccgaggcgttcttcctactctgatgcaccactcaacacaacacttcagataccagatatgtggagattccgcaccccccacaacacacacaccaagcaattctccagcagacaccagctgtgtagttcagttcagttctgacgctgcccacctggcagtagtgtcagatcccacaagttaagggctcagtcccaagagactactgcttctctcctcagatgccaacgtaaatcgccagattgtgacctgtgctcctgactgactgtctctaactttggcttcccatcaccccttctcaggctcagttcatctactagggcagctcacagaacttaggcaaatacttatatttgctgatttattataaaggatatttcaagggatacagatgaacagccagaaggaagagatgcacagtagggcatgtaggcaggggggtggagtatccatgccctttccagatgtgccagcctcctggcacctcagcaaccaggagcttgtctgttatgtagacatgattgattacatcattgaccattggtgatcaattcaacccgcagcctctctcccttccccagaggtcagagggtggggttgagagtttcagcctctaatcagatgattttcctggcaaccagccacctacgcatcaggagactattgaggagcccaccaagtatcgcctcattagaacaaaagaagctcccattacccaacagattccaaaagattttgcagctctgtgtcagacactctggtctctcaggaaattacagagctcttatgagctctgtgttaggaactggggtcaaagattaagtatcagggctgggtgtggtggttcacgtcagtaatcccagcattttgggaggccaaggcaggcagatcactagaggtcaggagttcgaggtcagccttgccaacatggcaataccccgtctctactaaaaatacaaaaattagctgagcatggtggcaggcacctgtaatctcagctactggggaggctgaggcaggagaatcgcttgaaccaggaggcagaggttgcagtgagccaggattgcaccactgctctccagtctgggtgacagagtgagactgcatctcaaaaaaaaaaaaaaagattaaatatgagaacgaaagatgcatataaatagatagggacgtaatttccctatctatttataagggtttcaggagctctacatcaggaactaaatgtataccagtgatatggtttggatctgcatccccacccacatctcataggaattgtgatccccagtgttggaggtggggtttggtgagaggtgattagatcatgggggtggatccttcaggaatggtttagccccatcaccttggtgctgtgagtgagttctcacgagatctggtcgtttaaaagtgtgtagcacctccctgctccctctttcttcctcctgcttctgccatggaaaatgcctccctcccgctttgccttctgccatgattgtaagttccctgaggcctccccagaaacgtgtcaccatgcttcctgtacggcctgtggaactgtgaagcaattaaacctcttttctgtataaattacccagtctcaggtatttccttatagcaatgagagaacagatgaatacaaccagaggccaaatacatatttcttattacacagcatcatactttgcttcacatgtgtataaccaaggatgtttttgcttgtcttatatggtatgaccagcttggcagtggatctaaccttttaggacttttgctactaactctgcttggtttctgtttgtgtgtgacaatgtgattcaagcagatgttatagtctggtgaacgccaggtgtactgtactggagaaaatagaaaaagtcaggggctggtttgataccttgtggtcttcctgcatgtactatatgccaggagacttacttcatagtaagacatactatgaagccactagaaattgtttttaaagactagtttagtgacatgatgttaagaagagtggcaaggtacaaatgcctataaatagaccagaatgaaaatatacttaaatgtacctggagaaaaaggccagaaggaagtgcgccaacatgataacgtttatctctcggtgctcatagaatgagtagttttttttttctttatactcttccacattttccaaattttcacaaatgggcttggattacttttataatcagtaatttaaataaaccttttaaaagcacagcttgtctatatttcatagtaaagtctagataatctctgctgactttaaattcagcagtattatatacttaactatgattgagctaaaagatgctgtcattgaatttttaattttgatacgatgtccatttagaaaataagttagaacctcctttggactttttccctcagtgaacagcttatatcaaattagcatgaggttgattctgaattggctcacacttgaagtgaatgtcctttgtaattttcaaagtgatcagtgagggattagaagcttgctgtaaagtggcagtttacctacacttgctcagctgtaaattattaacttttggcccaaaggtagccctggaagtcctgagctattcattcaggagcacggtaggcagaggccaatgaccttaaaaccaaacggccagatttctaagcgcagtcttaaagcattcttctttgtttccacaaagatcaaagatatccttaaatcgatgttagagaaagcgttcaaagaagtgttcagcttcaaagaaaaaaaagtggtaagctttctagccctttccagctcgaagtgccctggggtctgttggtttctgggtaggttgggcgatagggactttgcctggttgccttttttgctgtctgcttcctcatctgtgaaatggggataacaacagtgcctgctcaaacttgttgggtggactgaatgaatccgtccatataaaatgcctggcacataagcactcatcagctgttgttataattaaggtcagtccttgaaaggcttaaagaaacctgggcaggaggctgctgtaagtgacaagccacccacactgtcaggctgcatgcattcccattcgttaggtgcctctttgggaattctggatactgactggcacacagtgggcattctgtaaatggtggttaaatggatgaatgaaccggtaagaccccctccctcactatgggtttctcttactcatctgtaactaattccaaagtctaccatcatgaaagagcctgcactgttgtcacctgcctctactgaggtggctgatagactagctgctgctggtgtctatcacacaggctacaggtcctggacccctgcaggatgggcaaccaccatcctgactggctgagagtggacacccaggaaaagatgggtgtgggccatgcagaaagctgcagcggaatggcattagtgcaactccacgtgtgtgcccgacgtgctggaacagggagagggaagcagaggcagcgtagtgtcagaagcgtacacaggcagaggtggctaggggagtggggagcatccatgtggccggcagctggggactgacaggcacagctggatcctctcccaccgtgtagccacctgcccaaactccactaagccttttcaaggactgaccttaattataacagctgatgaagcttattgtgtgctgggcattttacatagatgagttcagtcaatccacccaatagtctcaagcgggtgctgttgttatccctagtttagagatatcaaagaagttgaacaagccccatcacaggaaaaaggaggtgctgggatttgatccctggcagcctgactctgaagcctgtgtaaccttgtgcttcctcctcctgctggaaacatcctgttcctgtgtgtggactgcacaccccgggtgccagaaacctcactgtggattgtctgtctgagatctaccctgtccatgtgtcacagtattggaaaaggttctggaactctggcctttgtctcaaaaaaagttgggggtgggtgggcggtctcgctctgtcacctaggctggagtgcaatggcgcgatctcggctcactgcaacctccgcctcctgggttcaagtgattctcctgcctcagtctcctgagcagctgggactacaggtgccccctaccacgcccagctaatttttgtatttttggtagagatgggggttttgccatgttggccaggctggtctcaaactcctgagctcaagtgatccatttgcctcggcctcccaaagtgctggaattacaggtgtgagccaccgtgcccagcctggccttttttttttttaatacaataaaaagattaattgaaaattattaaatccatagcatagttttctgcagtttaccgtattgttcaatttaggtataattacagatacaggtgccctaataccacaaaactgtctggctagtgtgaactttggtccctaaagatctggtgaaatccctagccaggtgcagcagaggaatttgtctttgcctggattatcatctttggttcttactgtcctgtgttgcctctgtggcccatccattcctaggctgcaaggatggcttcaggccatttctgcttgtagagacttgcattctctctctggaattgctctaagcttagattttcagttgagcaaacactcatcacatgtacctgcagagagctcctgctgtctcttttctcagttgcataccaccccaggtaaggagggtccctctgcctccagtgtcactgcaaagcgacagctacctgttgcccattgcccaggctcacgtttggtcttttgtttggctgcctctcaggtagtggaaggtgaaacacaggacttttcctgatagagatagttattcctctgttgaaatccaatttaaatatcgttctcttcatggcaaaaaagagtcctagagttgctcaggccattctttggttcacagtccccaggatgcatgcaactgggatttttcttaaactacttacctcttttatttctatggtaactcccatgctaggaatacaaaacacaaatctgcacagcaatgttgcacactctctgttttattttccccaaattagccatgtttgagcgtggacctcttcatgggcagtgaggatcactcagcacacatttctgtaaactttttggtgcgcgtgggttttactgtcttctgttgaagctgtgtcccccatttggaaggacgtgcaggtgtgaaggaaggacagttcttgctgaaaaagatgggaatggcttgcagatgtctgtggattaagcagatctaaaagctatgagaaaactgcctacttgtgtgtgtgcgcgtatgtgtatagtaaatgtatatatgcatatattttatattgacattctgtagatatgtttgaatacagaaacttgtttttactccgactactgaatccagaagtaccaaataatatacagtaaacagtaaaaccaagatttaaggttgtgtcaaaaaggtacagtgattcagtcatatccatttgtcatttgtttcagccttttttttttttttgagatggagtcttgctctgtcaccaggctggagtgcagtggcgcgatctcagctcaccgcaacctctgcctcccgggctcaagcaattctcctgcctcagcctcctaagtagctgggacttacaggtgcatgtcaccacgcctggctaatttttgtatttttagtagagacggggtttcaccatattggccagggtggcctcgatctcctgacctcaagtgatcttccagccccagcctcctaaagtgcgggattataggcacgagccactgctcccagccggtttcagcgtttttctttgtttgtttgttttttaagagggagtctcactctgttgcccaggctggagtgcagtggcgcgatctcggctcactgcaagctccgccttctgtgttcacgccattctcctacctcagcctcctgtgtagctgggactacaggcgcccaccatcacgcccggctaatttttttttttttttgtatttttagtagagaaggggtttcaccgtgttagccagtatggtcttgatctcctgacctcgtgatcgcccacctcagcctcccaaagtgctgggattacaggcttgagccactgcacctggcctcagcattttttgagtgtttttctttctgcagttgatcagttggatcctccatatcttgcgtatatacatgggctcaattattatgttaggataatcaaataagaatactagttcaatgattagcactgagtggttgttaggcagtcatgtgctcaacactgatgtcacctctttctgtaagcatactgagtagagacattttttaggtttaaattgacttaaatgaaagtgaataaaaaggccttttcaaaagaatgggtttgaaaaacctcagtaccctttaatacatgtacatttctttcctttcttcatttaatataacatgtgtctgttgtaactgtgtttcttaaatgttattttaaggttatatgttctttaattatggtcaaatataatttggtcaccaaaaacgaaataatagtttaaaacaagtagctgttactaagggtgctaaaaatactcattttataattaatttttaaagttttcttagtatattataaattgtgccctggtcaagtacaaatgtacacatcaaaatgcccatattgtatctgtctttagtcacttgatgtgaattatatgtgaattttttttggttcaaagttttactaaccagaattaaacactccgcatgagaaaaacggcacaacacaatcttgaggtcccttctgaatcatcagattatattatgcttcatatgttaaagaaaaaagaaacctgcctactttattaaacttacaagtttaatagagtcttggagattgatgtcttggggcatgattgggaaagtctccaaggcataggtccatccatgtatttcttcatttattgacatcttgtgcccagcacttactgagccacagcaatgtgtagtaaacataatgcgtcctcagtcagtgtttgttgaaggggtaaacaaaccccattctgggttgtgttcttttttttttttttttttttttaaatatgagacggagtcttgctctgtcaccaggctggaatacagtggcgcaatctcggctcactgcagcctccgcctcctgagttcaagcgattcccctgcctcagcctcccaagtagctgggactgcagaagtatgccaccacgcccggctaattttgtatttttagtagagacggagtttcaccatgttggccaggatggtcttgatctcctgacctggtgatccacctgccttggcctcccaaagtgctaggatgacaggcgtgaaccaccgcacctggccaggggacatgttcttaaagtttatgaagcatcagctttgtctaagctttagtcaagagtcagaactaatacagatggtcccaacttagcatggtttggcttaagatttttcaacttcatgacggtgtaaaagtgatagaaattcagtagaaattgtacttcaagtacctgtacgaccattctgtttttcatttttcagcacagcattcagtaaatacacaagatacttaacattttattatcaaataggctttgcatgagatgattttacccaactgtaggctcatgtaagtgttctgtggacggttaaggtaggctcggctacgatatggtgttaggtgtattaaatgcacgacaatactttcaatatatggtggtttttcgggatgtaacccattctaggttgaggagcatggagcatttgtagtcagagggaagaaaagacatttggaggattttgactggcgatttttatcattttgagaccagttttggactaagaagacagtcaaatcaatgttctcttttggcctgaagttttggaattcagtgatgtcgttgtcccctgcattcccctcctttgtggaatttcaaaacccccttcacataatgagagaaattaaccctgaagaaagaaaggactggaatttctactagcttgttgataatgcattattgttatgctgtcatgggaaacctgtcttcctaggttctaaattggtggatgactgtctggtgacggagtccaagcgtcattgcacaatgaagatgaaaaacgcatgttggatggctactccagtgaagttgaaaaatgcttgcctgataaaatgcttgcctgatggctactccagttgggcacatgcatactgccttctgcttttgctcaggaggaagataagtgaaactaaaggattttggttgagtaatttagagagagagtaaaaagattttggtgtttgtcatgggagttcacaggctcttctaatggaacagagaactgctttaggggccagtttcaggtttttgcctttctggaaggaaggggcagtcccttttccctttgaccacttacctctattgtcagtttgtgtaattatgtcagaactcagccacagcctctgttttttttttttttttttatagctctatcaagtgattttcagctttatagggaaagatagctctgaaattttctttcttctttcttctcttctcttctcttttctttctttttttgagacagagtcttactctattattcaggctggagtatagtggcaccatctcagctcactgcagcctccatctcccaggttcaagcaattctcctgcctcagcctcccaggtggctgggattacaggcacccgccaccaggcctggctaattttttttttttttttttcttttagtggagactgggtttcatcatgttggccaggcttgtctccaactcctggcctcaagtgatccacccgccttggcctcccaaagtgttgggattacaggtgtgaaccaccatgcctggccttgaaatttctttttctctactttttcctttttacccactgtttagtttgctagggctgctgtgacagagtaccacagactgggtagcttaaacagcagaagtttattttttcacaattctggtggctagatgtttaagatcaaggtgtcagcagggggttggttttgtctggagcttctctccttgcctcgtcgatgccatctcctccttgtatctttacgtggttttctctctgtccttgtttgtcataatctcttctcataaagatcccagtcctaccagattagggcccaccttaatgacctcatataaccctcttgcctttctaaaaggtcctatttccaaataaggtcacattctgagatactggggattgggactttaacatgagtgatttgaggggagactaacgtgaatttttggggggtgaggttcagctcataacacccacttcactttttcgtagtacattggcagttctgtttcaagagctcagttaataattatttgatgtgtcatggattagaacatgaaacaggaattttgttttattcataaaactgtatccctagcacctagagcatagcgtaagccctcaataaatataggttggatattattggatgaatacatgtcatatctggaagaaggataaaggaatgccctgaagacatgttagtttcaaaatgttctaaaggcccagaagggtagtgaggattttcactggcttcagggctctgtgcaataatatagaaatagagaatctcacactgaagccagtcaacaggaccaacttcttttagccagtcctgtctttccagcagcatcatgcaatctaggacataagagagcccgtgtcaaaccatttttatataccgtgacactcttatttttaacacagtggttggattatttataagcaatcttggattcattcaataaccacaggtagatagtgctctcacctcattaaagcattattgcaggccgggcatggtggctcacacctgtaatcctagcgctttgggaggctgaggcaggtggatcgcctgaggtcaggagttcgagaccagcctggccaacatggtgaaaccccgtctctactaaaaatagaaaaattagctgagcatagtggcaggcacctgtaatcctagctactcgggaggctgaggcaggagaatcgcttgaaccagggaggtggaggttgcagtgagcccagatcacgccattgcactccagcctgggtgataaaagcgagaccttgtctcaaaaaaaaaaagtattattgcagagaaggaggtactcttagaactctggactctgttagcaaaagcgttggggattgatagtgatttaattttattcatgatgctgagagagtctcaccggaatgcagcgaggattttgcccctcatgtcatcaagctggtagtactttgttttatgcccggtttcttgtctgatgcaaccttttatgcaccatagtgaaaagttgtgcttaacatgtttatgatcccatatttggaaatcttgccttatttggattttgcaggtttgatagtttgataattcagagaggttggactcaaatttttatctataaacaagggatttactaacaatagtttggaatgatatgactaagaaagatgttcattacttacagatctctttagaagcatcatttacatacaataattacctgactcagaagaaagtcccctagggaagtcatctgacagtcctggtcactgtctgtgctttaaagctggctgttactgaagcctttaatgcatactgtttttcttcccaggtaatctgcaatagtaattatggtttagttgagtggcctcccccagttgagaaacacaatcataccatgcagtaaaaaatatttaaagcacacttatagttctagaactttgcatggataactctaattagtctgggagcgcttccctggagccgaatgtgtttaagaattcaatcttttaagtgccggtgatgtcagtttggagacagcagtatgtggctccattccaccgtgaatcctttgctagctgcagtgtactttagctaatagaatcaagtgcttgtcttcaagttttttaagagcataaaaaccctgtttattaaaacaattctctttggcactttgcagcattatgataatgctgtcttagcagaagtgtagagagctgtgaactcctagggggaggctctggaggaggaccattctttcccattgtatttcttcgggacaagcatcatttctttccttagtcaaaggctttgtctcagcttgcacttcacgttttgaatatctttctggagaaaagcaacagcaagtattctggatattactcatgatgatggttttctttgatgcctatctaatataaactcccattctcctggaacctcacatattttaaaaaatattacttgaggctgggcccagtggctcacgcctgtaatcccagcactttgggaggccgaggctggtggatcacttgaggccaggagttcaagaccagcctgggcaacatgttgaaactctactaaaaataaaaaaatcagccaggcatgatggcggcatctgtaatcccagctacttgggaggctgaggcatgagaattgcttgaacccaggaggcagagattgcactgacctgagatggcaccactgcactatagccgaggcagcagagcacgaccctgtctcaaacacacacacacacacacacacacacacacacacacacacatctttgaagtaagttactgatagggatggaagtcttccaaatctggaaaaatcaatgtatgaaagatccataaatattctgaatttgtcttaatgtgtctatgcacaatgtaaggaatgcattgataggtttctgtgctgttccccccacccccaccgccttttttttgtgacagagtcttgctgtgacacccaggctggaatgcagtggcatgatctgggctcattgcagcctcaaccacccgggctcaagcgattctcccgcctcagcctcccgagtagctgggactacagtcctgcaccaccgtgcctggctaatttttttttgtgtgtgtatttttttagtagagatggggttttactgtgttgcccaggctggtctcgaactcctgggctccagcgatccaccctccttggcctcccaatgtgttgggattacaggcatgatccaccgtgcccagcctgtatactgttgctatatagaagagtctagtaaagtctggctcatatttgaacattcaagaaatagtcgttggtcctgtcgctcccagaagctgcacaatttttgagtaaacatagccaaagttttcagaatcactgaatgctgctagttcttttcttttcgtgattaattcagacaggccgcatccctgcgagacccttcttctcccacctccaccaacatccacagacctctccctccaaggctacaaccaccgagccctctgacagatttgatcgcactgctcaggcttactgtcctcactttgttctgtgtgtggtttggtatttttctgtcctgcccacccaggccaggccttccccacggtgctgtgatagagtattgttatttgttgcttattgtctggagaaaatctctcaattccatatcaaactgttgtttgaggccttttgttttcattgtcaaatgtgtcgggtggcagtctcatgaaaaaaatcacatttgaaggtatattcataatacctggtaggaagagaaaaataatggtgttcctgtgacctgtttacctgattctgaaactaaacagtgttgcatggaaagcgattttagcgatcttagaaaagaatgtgttgtgtcttttttttggaaacccagcgattcagttagcatattatttgtttgcgtgtatcttaccctttcaagaactctaaggtatgtgcgacatggtaaccccaatgcaaacggcattaaattgtggaagcaggaatggtgttaaaaggattcttagaggtggtgccggttaggaggaggaaggaagccgttgcatgccaggtatggtgtcaccacacatatttcgtcctggtagtgatcctgtgaattaccctccgtgaccatgctttgtggttgagcacagtgagtccctgtctgggcaagggatgatgtagcagcaaatggccgagctggctaggagtcacacccaggcctcctttgtctacgttggattactttttctgtgtctaccagcattagaaaatgagaaaagtgtcattatttgcaggaacatagggcatttcaggttaggaaggaagcaagagtgaaagtctaggatagaggtgaacatgaaccaggatattcggggaacgatgatcagacagtccagctggagtggggagtgctggtgtagggtggggaaggaaaggttggcaagaagtcacgcccttctgcccgactgaggaattggttttcatcatctataggaacttttgtaagtttttgaggagaaacactagtgagtgacaacttgggagtggtgtttgaccataaaggttaggcagcctgtgttgtgcaaagtgattatacaggagcaagatttcaggttgtgtcaatggtccagggaggcggagtaaacagacaggaagacaggaaggagtaagtgaaacgttaaaagatttgggtggttgcagaggggaggtggtttgaggaggaagattattgtagcaccatctgctggcaccagtactatctacaccagagccattcctcttcctgtgctgcaagaacccccgttttgttcaactgtccaacccttgcccttgtaacttgggtaaatcctgactgctttgagacagtcgtgggaatacccttcaagggtgggcatgtgattcctgttagtgagcaggtaacttctgagaaaggtttctttaccctaaaaagggacacaaagaagaggttgtttcagctgctgctggatgttgccatgcgtgcatgtatctcctggagcagtggcagccatcctgtgaccatgaggaaagctggcagaaggaaacaggaccttcgtaggtggttgagtggctaaattaattaaccctggggttttcctgcctcagacctttttgtaagattattaacctttattgtttaaggcaggggttggcaaactatggtccatgagacaccagccacttaaaaaaaatttttttttttaatttttaagagacgaggtcttgctctgtcttccaggagcatagtggtgcagtcttggctcactgcaacctccacctcccgggctcaagtgatcctcccacctcagcctcctaagtagctgggactacaggtgtgtgccaccatgtctggctaatttttgtatttctcgtagagacgaggttttgccatgttacccaggctggttttgaactcctaagctcaggcaatccacccgccttggcctcccaaagtgctgggatcataggcatgcaccaccatgcctggcctcacttgttttttgtaaataaagttttattggcatgcagcaatgtcatattgtctgtggctgcttttgcattgcagtggtggaattgagtagttatgaaagagagacagtatggttcacaaagccttaaatatttgctatctggtcttttagagaaaaagtttgttcacttctggtctaagccattttgagttaggttttctgtttatttgtagccaaagcctgtttaagatgctggccttgttttgtacctcttaactggagattgtcctgtaggcaagggctttctagagctgttgtgctgtcaggactgaagatgtgcatttgggattcactttcatatcacagaaagcagttaagaaagagtttctaagtatggggggatttataacatcaagtgcagatttgttgcaatttcaatgtggtggtgaaaagccaagatggcaggtgcttaaaaagggaatgagtgggaagatcaatttattggcataaattaaaagaaatgtttcagatatttcacctgagaacctaggatgcatcttgatggtcctagattatgaaagttaatgtttaatctgacttgctccaaacgaggacaaagttaggcaaaaatgcatcccatgtaacttgtttttgtggcctctgtgattcctcctcctgacctctgctgtgctggtactgagcaaagacttaaggtatatatgagaccctcatgtataatggtttgactgatagccccttacttgtatgatttttttctcatcgtaaatggtgcttttacacagtaattgcccgactcacatgattcacttcgattccactctctgtggctgatgttgcatgaaggttgtaggcactgctgtgccagagtcaacagggataaagaaacctgatagattgatttgatggcaggaatgtgtgattagagaaggtcgaatccataggcctttgcaggaagcagggattccagcaccgatatcgagctgtcttcaaaatactaatgaacaggtgagatgtcaaaggaagacagcatgaaccaaagatgatttatttgatcacttcagggggaataaaaccagttgaaatcacattagaattcaagggaaactgcacaagacatttcaagaaagttgaaaaagatagtccagaaaagttaagctgaaaaatttttctttctttttttttttttttgagatagaatctcgctctgtcacccaggctagagtgcagtggcacaatcttggctcactgcaaccttcacctcctgggtttaagcaattctcctgcttcagcctcccgagaagctgggactacagtcatgtatcaccatgcccagctaatttttatatttttggtagagatgggttttcactatgttgctcaggctggtctcgaactcctgacctcaagtgatccgcccactctggcctcccaaattgccgggattataggtgtgagccaccgcgcccagcctgaaaatcttgaaggagaaggctgctactccttgcctgctgcagatacttaattttgatgaaatagagagtaaaggatcattgaaggagtcactgtaaatttaaactcgtacttaagcatatactacctgaagacgtttaagagccattaatgtacatgaaagtattaggtaaagtttgagataaattgtcttatttttaaatgtagttggaagatctttgggggtgataaagaacaccttttttgtcagcaggagatttctttttgtggtagtttttcacgctcttccgccagatccaaacttcttgagagtgtggactgtgtctggttttgttcagctaaaatctgacatagtgcttggtatctagtagatgcttcataaatatgtgttaaataaatgtgctttactcctaattttataagacttgtgttaaggctgcttcagtagtcaagctccgcatagtagaaacatcttccaaaatgaagattgacaacttagctttaatatcgttgggtttcatgaacgtaatacatgtgtctgaatgcatacatggggttttactttcttttcatgatgggttttgatatatttaacgtttgaaattgatttttagaaacagaacctcagtctgtaccattacagctctgggaagtgagagttttctacttcactgtggtttgatttgtgattatcatttaataaccagttagtagtgaggggttgcatgtacattgcatggaatattagggctgggaagagatttagtgatagttgcatctagtccatttttttttccaaatgaggaaactgaggtaacttcctcacctaaggtccaactgctgattcttttcatagagggaagctaccgcctatctggttccttctctcctcactgccctatcctccctgcccccaatcctgcctgtacctccctgcaaaatttaggcaaaggtagagtccatcttcatgagagtatacattgggtaagagaattaatgtgacggataggaagaagttactataggaatgctgggagtggtggtttatgtagttctctgattgctttaagaccttttactgaagtgaaacctttattcttagcagatttgggttcatggatgtaagcatctgcttaggcttgtgaccagcatctctgtggtctgtgtgatagaatactgcttttctctgcacccttcaaggactcctgagctacacactctttatatgatagagaaaattatagatgtacttatctgttgggtggttctggatgaaagttccgttttctttgtctgcacagcccctgatgagctcttccctgctctgctgggaactggccctcatcctccttttccatcaaggttcctcttcaggctttgagcggatccatgcggagagagaacagtctcccgcctttccccatttcaagtccctggagcctctaggctctggggggcaacaccgaatacagggggcagagtgtggtgcccatccggcatcatcagcttttgcagcctcagcccccagctgactacagggacacctctgccatgcctcctttcccagggccatggctccggaagagccagtatctggagtcatggccctgggaccagaggcatgacagaggtctccctgtagtcaaaacctgtgcttgggttcgtggtaagccatctgaggcatctgctgtgttcctcccctattcttaaggggtggtctctctctctcagggttgaagcctaaatctggggcatgggtctgatgcaggtccttagggggccagccctgtggtgcactgagccacaaagaggttccagattgaaacccttacagatcttcctccattagtgcttgattttcattcatggtgcagagaacttgcaggacaaggttcatttgcccttctctaccattcctcctttgcctttgtccacatagatgaggagcaaggtggccttcaggagactttctggggcactaggaaatggccaagtgataggatgcagagttgaagacggctgttttaggccagggctcccagcactgtagcttgattactgctgattacttcagttcctccaaccaatcctttaccttccatgcagagaggaaaagtcccacttactgactggcagagggctttccaaggaaatcacaggccccaaggaaaagtggagtgttaatttgcttcatggggtgaaactgctttctgaaagcatggtttgggcctccagtttgtaataaaatcacagccagcccttattgttcacactggaaaatttattcttgtttgtgtaccactaatgactagctttcagaatgcttactttcttctcataattgtccactaatttactgtccttctgatgggaagaataacaatgtatttgaagttccttgggctactgggtttattgttttcgatacttttagatatttcaaacatggaccttttacgtgctttatgttgcgcaatattcatatttattagggctatttaatagcgatgcaaatgagttcagtgcagctgtgccggacaatagtcatggaaatgaattcatcttgttgcttttttcttttcttgggtcattctgatcttttcatacttttcttaatggaacaagcacgtttcttcaggaaaggtggcctcatgttttcatttgtctgcaggacaaataatttgagtttcatttcttcctgtggctcatgatccaaattggtcagaataaagttggttgcatcagaaatattgcagaagtttagtctctgctctccagaggttggctgagaaagcttcactctgggtagctgtcgcttcccctctgcgctccagcaaagtccatgctcatcagtgacacacatgcccttcccctccattgtattactcttaaattccttctgaaactaagaatttagcactaaatggaattgattcctgagttggacacattagtagttcaaccctggttgccagctctgtccctcttccgcacatcatttgcagcttttaatcttcactgaaagccaataattaagtatagcagaattatgtctgaagcaaggccaaattggcactgggtaaacctgaggacccgtcccatggaaaaccagtaataatttccccccgcatcctaattcttttttcatttcaaatcagcatttccaaagcactttcaagaccgttccctttttttatccttaggctgaaacatgccctgaaaggaaggggagaatgttttagtgactcatattcaagaaagagaacattgccaaaaatttgcaacaacaaggtaaatttattactcatgcaagtaagaagcagagctctcttcagtggcagctttcctcagcaaagctgggagccgatcttgtttaggatcttgggaagcgtgaagttcgaggctggtcaggctttgagaggtgggagtgagaggtcattagcagggtccttggatgagtgccttgttgatcagctgttgacaaaagcatggggatgtcagaagcccgtgtactggttctgagctgtcattgattcttaaactggtagtttcttgttaccatgactacagatcattcccccacctttacttcccccaagcacactcttcctccacatacgctttttgatgttttctcagacaaagcttcaggagagaccctcagggagaatcttccctgtggtgattaattttcctccctgataatattttattttcagggggtctgattttcatttgcattaaatatgtgagaaaactatggcttagggaggtcatggggcttttctaagttcctgtatttggccagttggagaacctaggccttgtcacttcttgagatcttaagagtcttgatgccagggactgggccttattcttgtgagtttctttggtattttgcatgtagtaggtctgtagttgctgtttgttgattgaataagtgataccaccagtgcactgagcaggtcagattttgtttctaagtcagcacaggacccatcagtactgataaagccccaaaacccccacctttgcagtcagcctattgtgtatttggttggagcaaaagtaattgtggtttttgctatttttttaatgggaaaaactgcaattacttttgtaccaacctaagacctttcagtaagtgagagggcagcttgtgaagccaggctctttgtgaggtgtgagctactgaaggttaagtgtccaaaactagactctgatgtgtgcagttagccggggggaaggaggtagttcagaaaaccagaaggtggcagctagaattaataatccctgcctcctagtttggatataccctcactgcctttttttaaaagcaagaactctagagattaagtgttccaatagctgggatgcttttggaaggccgtgtatacctcagtgtatgtgttcccagtagtgtgtgccctggaggaaaccccagggcccagagcttccctgcagccccggccccagctctggccccggccctggccctggtcctggccctggaggcatcttctaatgaaattacctccactgaagtttcctataaacatagtcaagagcagcctctctccctgctgagctattgcagatccctcccacttcctcttctgctctcctttctctgaaacaccaagtgaggatgcgtgtttgcttgtttatggatggagtagctaaaggagcagggatggagcttgagttcctccagctcagaagttgatccgaggagtttttttcatttttgttttttatggagacagagtcttgctctgtcacccaggctggagtgcagtggtgttctctcagctcactgcaacctctgcctcccgggttcaagcaattctcaggccacagcctcccgagtagctgggactacaggcacccgtcaccacgccctgcccattttttatattttagtagagactgggtttcaccatgttgcccacgctggtctcgaactcctgagctcaaatcatccacccatcttggcctcccaaagtgttgggattataggtgtgagccactgcacccagtccacctgaggagtttctgaaacatctcactcaaacctccagcagtgaggcctgggcacctggttgttaactgagtttccctgaggaccctcagtcttcctcattagtaggccttgccctggtcaggcttcctcagtttgtggatggagcaggtagggcgcacggaggtgaatctcctgagccaggagcagcagagccaggatggaccctgacttctagcttccctcagcctgagctctttctctcctgccacactcttcttgggcctcttgctgtcaccctgggcttgtcaggtgccagcaggaactcttgggcaaatgggtcctatttctgcttgagtcttgaggtttggagcagcttaactgggagagaaggcagcatcctttaatgggggctggcagtttaatgccatcaaggggtaggatgggagtgtggaagacagcccgtcttcattagactttacaatgtggcttatcaagtgcagtgtttgaagaccttgtgaagacatcatgagcctcacagtgctaagagggacctgaatgaaaggaaaacaatggctttcaatgatgatttgggaaacatggatgatgcactgatctgagcttatagatcctgtccttgggtgaacagggagaggtcagaaacaggaggatgcttaattcattccagccaccgctgctggagttgttttagcaaagctccccatttctgtagttggtgctggcattttgacgatttccccctttgctatggtgatctggaagcacagagccagatgtgtagctgcttctttgttcctaggcacgccttttttccccgaatgtggccttggagtcagattgcccaggttcaaactttggttcctcggcttgttagctgcgtggcctagacagcttgcttaacttctcttgcctgggttagaatgatagcaccccagcagtcctaataacaattcctgggctacagtatttactacctaccttgtggggttattatgaggaacaagtacaatcataacatcaagggctgagagccttcctagaacacagtaactatcccattaatgttcacagaactatcaccactcatgaaatcctagcttgaatatttacattagtcttgtttctcaaacttgactctttggtttgatcgacattttccctaatgctgattttcacctttatttctactttgctgtttgtattcttgggagtaacctttgatgtatgaatgaaataaataaattcaaatgccaggcttttaccatggggtctaatgtgcttgaaatcagaatgcaatagacgcttttgctaagcttgagggcaaagaggggctagtgctgcatccaggggtttcagcctggggactgcgtcctggccctctctgtccaatgccttcctgattctcccccacttaagttgctatcacagtaccttgctagaccaactaactagcacagtttgagacttttctttccttgctctgacttctttgtaagtgcagcttatgttgtcagaaagctcaaaatgttgtgacaataaggctgcagtcccgtgcagccggcgttttgtcgtgtgggtgtgatggtgcttgtgtgctgtgttcttattggcaatcgcgagacgcaatcacggaatcacagatgccgcctacaaaaggtatctataaggtatctatgttccataaaagcaggtagcctgtttacttagccctggactaggcctctgggagggaggagggagaggtgggtgtgtgcaaatttggtggggagaaaaagtgttatataaaattgggaagatataaagcactgacaaaaagaaatgtgaaaagatgtgtttaaaacaatgcgcatgaagtgcgaagtctatggggcggttctgatgagcaagcatggaggactttttgggggaggggggtggtcttaagctgtgtcttaaagccaaaaaatgtgaagagaggtttccagatagagaggatgccatgagttaagtggatgcaggcatagcgctaagaataaaggagattgcgtgtttgacatgaccatcgtgaaggacccatgctctgttgaacctagtagtgaggttaggattggagaggccgagttacaggataaggaaagtagctttgtcatcatgggcaagaggaaaccactgcagcttctgagtggatccatggtgcaaatgggtggaaactggtgatggctggcaggggaaaaggggggtcccattttcaggcattatggagaaaagttaccaggatttgttcaataattggatggtaaagaaaaagagtgaagaaaaataattccaagtcttcagtgcttgagaatcaagaggttggatggcattgatgttgaatgaaaatcttgtgaaagctggagatgaatgacttagcagggggaagtcttagcactcttcaagagaggagaggcagtatgtccctgaagtttggattctggactctgcaatcatctgggtcaaaccccggttctaccagtcattagcttttgcaaccttgaccaaatgaacctctgtctgttttccccatttatgagggtgaaaatagcacctacctcagaaggtggtggcgaggattaagtgagagaacacacgtgaaatggttagaacagtgcctggcgtgtggtaagtacccactgaatgccagtgcttttattacggtgaatattcattgtattgaaagtcagacataggtgtggaaccagttatgggagtgaggataagtctagatttgggaatcagtcgcagagaggtggacgatgaaagtctgagaagaaaggatcttgctaatggagtgaactcagagcttgataaagggaggatgagtggaaatggagctcaacgctgtgccttgggaaatacctctgtggattggtgggagcacagtgagaaattcaagaaagacacagacaatggaataaccagagaattaggaggcaaatcgagagactgtgttgtcatgggaaccgaggaaggagaattttttttaaagatgtcgtataagtcagatacaatgagaattaagtgaaaattgaggctaacataatgtaccactgattaggcttgaatattattaaacatgctagagccgttcagctgtgggatgattgagaagccagagtttatgggatatgggaaccgtgatgggagattataggaaaaagatggagtggtgcttagaagaggcagcagagcaaacgaagccaggagttaagaatttaaaagctatacaaagagaactaatagagggcaagaaattagaaatacaaatgcaggcaggaatgcatgtgggagaccaggtagggagttggcagcatggggaacacagaggagaaaggccctgctgagcaggtggagaggaccttttttggcaaacaatggtgggcagatgtgtgcagtggtggagaaatctggatccaggggaaggcacaggctgagaacaggttttctccatcataataaatatctgcctgtgactggtataaatgtcgatgcttctcaaaccttaagaaacttccagcattttgttttgtttttcaaatgataagtttcttattcatactgcttctaagcattgggaaagaagtaactcagggagttttaaaaagcttttattttaaagaggtcttgtctcccaggaaacataacttttggaaacagtttacaaagaatttgctttttctcactgacagatagggtgtcttttggtgggagcagagccccagagccagaggacctgcctgcttgcttggcagtcccccgagcagacacaatttaggaacaggaaaccctagagaaacctgagtcaggatgctgtgggtcccagaagcaactgggtagttgtttcaagtttcctttttttttttttttttttgagcggggggtgggtggggcgggggcggcttcaaactggagattagcaaaaatgagttggatatttccttagacagttcaaaccctcataggtgaactcatctccgtctctgtttctgcttagttttctgcacatcctttctaagaactcacttatgtctataaataccttttaacaggttctcttcatatttggataccaggagtaaataagtgattttgcaagtatactcaaggattctggactaggtgctactgtgccctttatacagtctggtggggtttggggggtgggtgtgtgtggaaaagagaaactcccaaaccctcaaagaggatggggaacaatgtcctgaaagaacagggctcaggcagcagaagagctgaggggtctctgttctgaacgggtcccccttctccctgcccttcatcttgtgtgactgcggttgagaaagacctgcaggattaaaggatctggtgaccttgggaccccgcacttgcttggcagtgacagtcctgaggaactgtattctttcagttcctctatcagcaaagcagctcagtaggtaaagggcgaattccggcatttcagtgtctcttgccatgggtagctctcatatttccagttgatgatgtctggacacgtgcccttgtgaaatgagttgagtggtgtgagattgggagcccaaacctgtgaacacccaactgggctttttcctggccataaaaagctcgaataatggagagctttaggaaacaagttgtttgaaaactctgttgagttggctttgagcattcgtggaacattatttttaagaaccggttatttcatttaaaacagagtaaaaagagaagatgattgtattagtctgttctcatattgctgcaaagatactacctgagaccaggtactttataaaggaaagaggtttaattgattcatggttctgcatggctggggaggcctcaggaaactcacaatcatggtggaaggggaagcaaacatgtccttctttacagcgcagcaggaaggagaatgaacgagtgctcagtgaagggggaagccccttataaaaccatcagctcttgtgagaaactaactctcacgagaacaggatgggggatactgccccccatgattcaattatctctgcctagtccctcctacgacatgtggggattatgggaactacaattcaagatgaaatttgggtggggacacagccaaaccatatcagtgattgaggggagaacagggaatgaaacatcccctctcaacagtggtaggaataatggcctgtcatcattattgtcagcagtaactgacatttcttgaagacctcagtgcataaggcactgtactgagcgctttatattctgtgtcttgtttaatttcattcaaccctcccaacagcctgtactacattaaatactactgttacccacttttcttttctttcttttttttattgagacagagtcttgctttgttgtccaggctggagtgcagtggcacaatctcagctcactgcaacctccgcctcccaggttcaagtgactcttctgcctcagcctcccgagtagctgggactacaggtgtgcaccaccatacctggctaatttttgtattttttagtagagacagggtttcagcatattggccaggctggtctcgaactcctgaccttgtgatctgcctgccttgccctcccgaagtgctgggattacaggcatgagccatcgtgcccggccttttacccacattatacaggtgaaaaaaattatgttgctctaccatttccacaaatggcataggctggcctattactgtccttttccaaaatacgtgtctctcaaatagctctgcagctcttacagggctcctcgttgtcctctgtgctttacagtttgagatccttcacgttggaggtttgtagaggaccacagttgcaaaatagggtgcctggggtctctgcttatctgcattttgtcaaaggatactataggtcatggcgcatggtcttttgctgatgttcgttttggcaagaagcactatttttcatcatttgccaagaaaaccttttgtgcattttaccttaaggacctggatagcataagcagagaaagggaatcagcatttccatgttttgaaaagtaaaacaagactctttttggtctttgcgcccccatgccctagaaatcccataataagtgcaactgtctccttctgctgatggatttcctaagtcattcccagaaagaagttgggtgctttgtattgtattaatatattcatcctaaataagggtcttggggttttccccccttccaagatgtattaagaaggttgcttactgtaggctttgatttatttatttcctatgaaatgccagaaacaccaagtcctaaaatcctagatccaagtcattgacttctcagtgattatgaccacattgaattgattaaactcaagtgactgacaaggcgaataaaaatagcccaaaatgagtccagaccccatggttttaagagccccccaccagttccctaaagctacaggacggaaaggactcctgatcctttgtacctgaagagtgtggtgcctaacgtatagccaatgttcatttgtttcttctctctgtattttataaacataattactttgaatgaattgggttattcgggaagtcagcacatgtctccatctcctgctttctatttctagagtcctaagatagactttgctgacaagaagaggcccctgccccttcagagcttagagtgtagcagagagatgggtattcaggaaatcctcaaatagtgacagagccacagcggcagtgagtgacaggcaggagaactataggatgctggaagtgcatacaaccggggtgttacctagtctgggactggtggtcaagggggcttttttgaggcctggacaacccacagaccgagggtgggctagtgagagccagtgagggacactcttcaagatcccagcacttaaaagattggttgggcatgatgactcaggccgggaaccccagcactttgggaggctgagatgggaggattgcttgagcccaggagtttgagaccagccctggcaacaccgtaagaccccatctcaatgaaaagtaaattagtcagggccgggtatggtggctcatgcctgtaatcccagcattttgggaggctgaggcgggtggattgcctgagcttaggagtttgagatcagcctggcaacatggtgaaccctgtctctactaaaaatacaaaaaattagccgggcgtggtagcaggcacctgtaatcccagctactcaagaggctgaggcatgagaattccttggacccgggagacggatgttgcattgagcccagatcgcggcactgcactccagcctgggagacaaagcgaaactctgtctccaaaaaaaaaaaaaaaaaaaaaaaaaagtaaattagctaggcatgatggtacgtgcctgtggtgccaagctcctcaggaggctgaggcagaaggatggcctgaggccaggagttcgagattgcagtgagctgtgatcacacctctgcattccagcttggacgacagaacaacgccctgtttccaaaaaaaaaaaaagattggggtgctcttaagctcacagttctggccatctcctctttcctaagtggagggagatcgtggatccctgagggggaaacctacttcccctttcacttcaaagtctgcttctgtttctaaaaatgaactgaaaccccatctgtttgctcatgtatttgaaaacccttgaaaatgtttatttttgtacatcttcatacgactctcgtctcagagctgcttctcctcttcaggtggtttctgggcacactggggacgtctgtgcacctcctctgagtggaagtcaatgcctgtgatcccctttctaaaggaggcacggatagctgctgtgcggttttttcaacctgtagccagttttcatgtttttgttctcaaaataatactttttttttcaggtgaagacaaggaacatttaatttacactgaaatgatttttcctcttagaccttctgaaagctatgacgtatgtatatttataccataatagatgctaatggtgtcctctctgggtgatggtcccagagatgtttataccaaggcatttcactccactaataaatgtgggtggatggatggacgggcggacagatggaaatatcacacaggactgtgcccaggttccagacagtttggctttagggccccaactctgccaagggatattttttatatagcatcatgtttttcatcatgatgttagtctctctctcttttttttttctttgagatggagtctcgctctgttgccaggtgtgagtgcagtggcacgatcttaactgactgtgacctctgcctcctggattcaagcgattctcctgcctcagcctcccaagtagctggggctacaggtgcctgccatgcctggctgattttttttttttttagttgagacagggtttcatactggccaggctggtcttgaactcctgacctcaagtgatccacccacccaggcctcccaaagtgctgggattacaggcgtgagccactgcacctgcctgtaacatcatgatgttacagtcccccagctcctcacctggcctccctgtacccattcctggccccctccctccttcaatctcttttccacttcagagagtgatctttagcattcccagctccaccccacgctttctgcctgtaatcatttaaaggcttcccattgcttctaggatgaagtccaggatccttaaactggcctacaaggccctgtatcttcagctgccctgcgtctccagccgcctctcctcatcacccacactttttcttcatagcctccatcccagctgtaatgcagaattttgtttgataattatttaattcatgttcacctctcccattagactgcaagcttagcgaggccaggggctgttttgttgtttacccttgaaccccaacccatagcacatgtaagtactcatttgtcaggtgtttgtgtttcatatccattttttgccttttcttacatacatggacacacttttctctcttttgagataacttccagaattgagtggttatgagcaattcctggatccctgtttgcctcagagccggtaactgttctcaccttttgggaaccataaacgctgccattgttgacctgaacacgaggtgactctggcaggagccctggccatcgtcccttttttggttatcatctgacgtttgtgcagctacacacatcatatctcatttgatctcttggactcccgttggttagtagaaaccttattttatagacaaacagctgaagctcagaggtgttcagaaacttttgccccatttgctgcaagtggtccatgagggtctggaatcaagaccttctggttctggtttgatgctgggactgctctttctgaattgtttctatgcctgtctgttcaatgttataatgatgagggggccagtccctcaccagctgcattctaactggaggctagaaaataatgaatgggaagtaacttaggggaaaactatgatgaggttgttggcatttgttactcttggaaagaagtgtagccttggaaactagaggctaagaaataaagtgaggcttcttagatgtcgttgtgtattaaacaggaagcccgtttgctctggctgtagagtgtgcccatgagagtttatggaagaatgaacttgactcaataaataacccactcagtgcatgatacccttttcttcagctgcaggtaaatgtctgttatggtgagtgacatggtggcatgttgggctctatgaaactgagtccacacacagcctgctgtgctgcctgccctgaaacgggacaggcccttggtaaatgacttgctactgaatggtagtcctcacgatgacatgtgtggcccatttaatgagagaagtaaagaccgcagaggatggaggaaagggcagggggagaagtttagctaatattaaattcctgaccacccacacctaatgaaaaagaatgttctctgcttgcagaggcagtgaattaggctggcaaggtaccaagggaggaggaaaagtgtgtgaatggatacccgcttcatctgagcacagacttaacccagaaacgcaggcggtcaggaaatctaatgatggctttggacctgggcagacttgagttgagacctgtgccctccgcctcaccagcctcagaaggctgttgagtctttttctgagtctcagtttctcattctgtaattgggggatgataaggataaaacctgacaagataattgtgactcaaatgccagttcctagtactggtgttagcacaaagctgagtaaatactcatggattcaaaggcgcgagatgtcataccatccaagttatcaggaatgtgtttgctgagggctccctgggtgctgacctggctctacaggttctgaataaagagttgaacagggtctagttcctgtagtcaaggcacttcagatagagagaaactggcttgccaccaactctcatggaatcccagatgtgtgtgctttcatagttcaacgttctggaatccagaggtgtcttacatgatggcctgtcatagtttaatgggccgccttttatttcttggaggtacatctatgatggctgggggtgtggattctcagagacctatcgtcagatagttccttggagcaattctcagagctaggctgcttaaggcatatgagggctcaggactcagagccctccttctttatgaccttccagggaacatcccttttcctggagtgtaaaatactgcatgttatcaggtttgcagtttccttgagttagggtgggggtgtcacaaggcttatctttgaggctgaggttcagtggatttggagaagtgtgttggcaatgaatttcggggagaatcttcccctcgttgtctgcctgtgtaagagttaattttagcagttgtgattgtgaattatttgtcaaaagatactcccacttctgaagcccttgtttgcacctggtggagacaataaagcttctaagagcaaaatataattttcttccctgcttgtttcttttcttagcattttagaaaatcccactcagtttctagagttaacacctttccccactaatcagaacacaacacacaacacacacacactctcacacatacagactccctcactgaccttatgggccctttgctctgctaaacacataggtactggatggagtttgtagcaacatgtccctgccccgaatttgtcatccagatgtcgcctttggatgtcatgtccttgacattgacccagggtgggacttctgcagtcaaatgctctacccctgagctatcccccctacggtgggacttctgaataaagcctgtgtcactgtctctctggttcccttcagcgggagctctctgtggtttaatggagtctccacttgaccaggagtgtttccagatgagaaacccagggagggctgcaagcaaatgagagtgaaaactgagctctgtcccactccaaatggcatccgggattcacataccaaggctggctgggaacagctgatccaggctgatcctgacactggagagtccaagcattggaggccagaggccattcagaagaattacctcggagtagaaggcttcctaatgagcaataaggaggaactcccccattcttagggcacaggcctaattgaaaccatcctgggaagagaacatctaattaagtctgactcctcagaggactcaaatagttatatatgaagaaatgctaatctcgtggccttacttgtggctagggaacctgaggtgatgctcaggacagcaataccagcccttacggccttgctgtgtgtcctgggctgtgaacagtgcagaagtccctgtctgttcccgtgattttgacagaggatgccagaggcagaagtgctgctctttggtggtgtccttggtggtgttttaatctgtctacattagggttgggttcactttttttttttttcttcttttttttcttgagacagggtctggctctggctcaggctctgtccaggctggagtgcagtggcatgatcttggctcactgcaacctctgcctcccaggctcaagccatcctcccacctcagccttccaggtagctgggactacaggtgcgtgccactacacctggctaatttttgtattttctgtagagacagggttttgccgtgttgcccaggctggtctcaaactcctgagctcaagtgatccgtgcacctcggcctccctaagtgctgggattacaggcttgattccagccaaagtgcctggctgactctttgaattagaagttaaggtgagttttagaactctggtcttttctgtgatttgaaatgttgcctctggggaaggtgctgttttctagttttatgaaatgatagactctcttcccaacacacacacacacacactcacacattcacactcacactcccacctcttgagaagaccacaggagctgtggagacagttgtccttggtgtggccagcctggttgtgggacatgggccttaaggtgcagcacccccattcaccttctccaggatggaaacaattttcttcttcctcatcggccttgctcaagaaatatgccaggcattttcaatgtcttctgtccagacccagaaggatactcagactacttctgtttaaatggggcttgtttttcataagcagttgcattgttgatgtggctaaatttagacagaaccccatctagattgtggtcaagggctatgaatgctgcctccactgagcaccaggtgggcttgtacattttggtgactcattgctgcttgtgatgagaggggcctgcacacttaaacccctccaaggcagcactgccctgttcagtcttacctatgactcaacgtcaggaagctgaggaccccggtagcctctagaactgaggtgtacccctgggctgcagtggaagaggatcttggggccctagtgatcccctagatctaaaaagcaaagagacagcttagaggaatagaggatttggtcagggtatgtgtgtgttggaggggtcagggcagttattttcttgcactgaattctgagcataaaaacttctagcttgctttgctttttgtcacccagcgatttctaaagacagtacacttgtgtgttcaaatcccttttcacacctggagaaattcactcttgactcccttccagtgtaagaagtagtttagcatagttccggaaacgcttcgatatcaagccatcaaaagacagactgcgaagtcactccgagtgtaagagctctctgtatgtagaggaccagctttctgagaatgttttggcagggacttgaaaatgtcagtcatgtgtagacagggaagtgtcataccattaagatgtatacgggatggtgacagagtgagagaggccttggggtgttgaaagaagggagtgatttttgtagtcccaattcattgtcctctgagtagctcttccctcagcctcttgcatgcgactttggctggtcggggatgccaggcgagttctgagccggagactcatggggagtcctcttgtgcagctgacaccttctggagacaccttcctcactcccaaaggcacggggccttagtgctttctgagtagccaccttggaccatcggttcagtaatttgaatagtaaaatgtgggatggcgttttcttgctaaagtgcagcttaactgggggagtgagttgttaaaagagcagggtggtagcatagatgacaggcgttcataaagcactgaatttagagatctggacctggactgtgctgctgaatgtggaaacctagactcagtgtgaccatctctaagctcctttgagcttctaggagtctgtcatcaaaggtggtttccaacagcctccagggccccctggccctttgtgctccatccccacctccgctcattccagtttcacctggggctatgtggctacctcctcacgtctaggctctcctccttctgagatgctctttctctttcttgtttactggagggcttggctaagaccaaactcgggtaccctgggcagaactagggactcctgtgcctcctttccagagcatcgtgtgtggaccctttttgtcgtgtagttatttggttatttttctgcttctgtcgggcagtgggtatcgacaggtaagactgccttatttgccttggtatctaggagcactcaaaagtgaatagattgaatggaattaaatccttgaaattacagtagaaagcttaggttctttagaatagaatcgtggtgaaagatggcctttgtgttctgtgtattctgtgccctttttccgctaacaagttgatatcgtgctgttattttgttttgttgataacatagtgtggactttgtacttctaaaccttaggaaaacgtggatcattagtcatttttgtcacattgcagtctgccctaataaacatagtattggaaaaacgagatctgttaaagggaatgatgaattttgctgccttggagcttgttgatacctgaaaattggtttcggaaatcgagacgcctgatggaagtttgtgtgtcgttttggctgcgttaggctcttcttgagccctattaggctcgatgccattaaactgctatgcgtaatgagggtgacacgttgcagtgaactcccatcctccaaaggcttttaaactttagaaacctgtgtatatgctgtgcctaccctttatagtatatattaaaataaagtcacacaaaaatccaagtttagtgattaaaataacattagaagtgcataattcacgttataaggaaagtctctcctttcagaagaattcactgtggctttccctgactcttgacatatgatttgatttacaccaaaccaaaaaaaattcagcaacatcacacatccctttaagcaatcaatgaaaatgctcattcagttttacccctcaaaatgtgctttagataagtgagtctaatggtatcaaataatgcctctgtggacaggcataagtgagattctggcaaaaaaaaaaaaatctaaaagttttttaaacttattgaatctgtcagtcttgctcaacttttttttgtagtattcatagtattttgaagagagtaggtccagctttgaaaaactctaaacttaaaaaaaaaaaaaaaaaaggtggccaggtgaggtggctcatgcctgtaatcctagcactttggaatgctgaggtgggaggattgcttgagcccacaatttccagatcagcctgggcaacatagtgagtccctgtctgtacaaaaaatgaattaaaaaaatagctgggtgtggtggcatgtgcctgtaggcctagctacttgggaggctgagctgggaggattgcttgagcccaggagatggaagtggtagtgagcagcgatagcaccactgcactccagcctgggcaacagcaagaccctatttcaaaaaaacaaaacaaaacaaaacaaaagcaaaaaaagcatgagctttaaagtgaatggataggtagagagattgaggaattttttggtaactccttagctatattgcctttaaaaaaaaaagtgtgtatattactttcagcaaaattatttcagcaaataagtataacactgctcttgtttatattctttcaattgaacctcgctgcccaaccagtagtacatcctcagccttttttcctctccccagatagctcatcttcacgatccctagcacagcactaaatgcaaacaaaatgtccttacatgtgagtcaagtacagtttagtctggagaaaaggcccctgtgtctgaagctgttccttctatgagccaaacatcaagtgttcaagtcagagggactacacagaccaggacagggggctggcttccagggctgaggttgttgctgtaattgtttttgggtgtgcacctgcagcgcctgtgtaaaggtggagacagtggtgggaggagtgaaatctcccaccgtggttggatgctggacgaacggcctcaggtgtaggcagcttttttgttgttgtttttttgtttgttttgttttgttctgccatgcgcttcagtttggaagcagcctatattgtacacgttgattactttgaagaagtgatttcttattttgcttcatgttcattttcaaggaggtataccttggggagtgggagtgttttttgtttttgttttttttttaagcattgtttatagccacaatagaatgtcattggaaagagtggaggctttggaattacatttttatcccatactaactgggtgacctttgacaagatcgttaactcatactgagtggagttcctgtttcatgctgggaatcatgctgggacctcaaagacctcctgttctggagagagagatgctcatcgggggccagcagagccaagttcacaggacagagcagggatgccccagccagtctgcaagaattggaacagcttggtggaagagagacacagtccctcttagtcacagtctccttgtctggaagtaggggcaatggtaccgcagaggggtggtactgagtgctaagtaaaacgagttagaaatgcctttcacagagtctgatgaatgaacgtgggtccccatctttggtacctgaagacggccatgtcccacaggtgtgtggtcagagggtgcacagttcacagaaggcctccacagtgaggtgggatgcaggtggaaagagaagtcccaggaaaagggaggcaggggaggaaacagaaagctgcggttggaagaagacctcagcacaggtgcactttttctcttgtggattagttattaccggatgactttcatccacacacttaacactctctttgcagggacagttttggggaagggtaggcgtctgctttcacagaaggtaattaccgcaaaagctggtaccagctcatgctgttctgatgttttggttacgcaatcatgggcccctgtactttagtacatttgtcttcataagctgtgctgaattattttttaaaaccgctaactgatgcgattagtaaaacattttggtttttaacttttgatgaaaatagcactgtttggaactgtgatgcaggggtttactgctgagtgaagttctagaattttgctgaaagtaacatgacctgctctgtgggtctcactctgtctctctgttaagattgttgagtgaatggaagaaaaggaagacttggtgtgtttccagtgatctataaagaaatgatgaagtgaatatgttctgtggatctctgttctctctttgactctattaaccaagtaatatcttaatttaaaatgatgaaatttaggaaattagacattgctattcatcttagaagggaacaaagtatccatgctggtctagtgaagccacatattaaatcctcttaaaacttaaactgtgccttttttccagatttgatctacgtgtggatattctaatgattgaatataataggattccattctttaatttcaaaacttttagaatacggagttagaatttatttatttatttatttatttatttatttatttatttattacctaaaacaagttcagtggaagatgctttttgattattatcacattttgggcttttgtttttggtaacatgcaggccatatatgaatgaaattttgctctttcacagaatgatatgagcatctgtttcttctaattagaatacatctacaggagaagagggattttaattttcatgttgtagcgaatgtctaagggttgaccgggtattttggaggagtagttgtactttgatcatatttgtatttgcttttctggtcaggagcctggataaggaagcgccccctaacgggtgggtggagcagagggagtggggcgagagatggagaggaggggccggggcaaggaaggatccctaggtctgccttcctgtccacagcactgcccgccagccacagctcctgagtcaaaggctctgaagcaaagttgtatgatgaaccttggatttcctgtacaatttggctaactctagggtgatctctaataaagacaaaggccaggggacagaaatatctttcttttgctcctggcaaatcccattttgattctatctcaatctaactgtccagaaaattggattgaaagcaggacaccgccgggaggtaaatcagattagggcttcctctaccacagcctccagcagacatttcattttgcagtgtgcgtccctcatttatatgaagccgtgtatggcccctccatgcagcagggtgcgtccaagctgacccagcgaaccaagacatcaggtgaccctccaatttgattcactgaaaatactgccggtggcttcattttctccagagaactgtctgcacctctgttcctttctttttatttgggtgcctatgatgacctcattgaagtcttcatctttttcttagccaatgtagcgtttgctaaggagccagacctcagataggaatggagagccccagaatccaggtgcagcacaggtgcttccagaaccttctatgtggtcccttcgggaaaggatcatctgtttttgtgaggcttaacaggaagacagaactagggaagaagcagggtgaggagggagaagtgcagctgtgtatagcgagaataaggatctgccgaaatttatcttggggtttttatttcctcttgaaatgttgtgcgttctgagaacctcgaggagtgtttttgttgcctgataggaactggcccggcttgttcctattgcactgaagccttcaggaatgcggcctctgcacctgtgatgaaaacaacatccaagaaacccaccagtgggttccagaacttcctttctacagtgactgtttgggtcacaaaacataactagacaaaaaattagctgggcgtggtggcgggtgcctgtagtcccagctactcaggaggctgaggcaggagaatggcatgaacctgggaggcggagcatgcagtgagccgagatggcaccactgcactccagcctggatgacagagcgagactccgtctcaaaaacaaacaaacaaaaaaacaaacaaaacacataactagaaattatgaggtttataagggctggtgtcttaaccgcaagtgcctgtttgaacccccattgagcttgtagcatcgagatgtgctgtgtgtcacattcagccacatttgtacagttggtggcatttaggagtcctgcctggaaggccaagaatatttttccccacagtggcttaggaaatggaactggagccctcattcccctcacttcccactggctaggtggtcacggatgtggaaatatcccaagcttgaaaccactgaagatggagctcctgacttggaacagaggctctggggtaaggcaggcattggggacttgagggaatcccaggaaaagactgggaactagaacccatgtgccctcgtacagatccacagtccccttgccttgggtcccgtgatcctttttttctttttttttttctttttttgagatagagtcttgctttgtcacccagactggagcgcagtggcttgatctcagctcactgcaacctccacctcctgggttcaagcgattctcctgcctcagcctcctaagtagctgagattacaggcgcccgccaccatgcccagctaattttttgtgttttcagtagaaacgtgtttcgccatgttgaccaggctggtctcgaactcctgacctcaggtgatccgcccacctcagcctcccaaagtgctgggattatagacgtgagccactgcgcccagcccccctgatctttagaactgccctgcttgcctccctttgcgccgccctcgtctgctgtaggtcgaattggtttaagagctgggcatccactggggagaaaaatcagagtagggcttcctgggactcttctgggttgttctgactaacattgggttttactcaaattttctctccctgatgtaaacacgcagatattttttaaggttttaagtgtgaccatttagcttacatgcaagtcagaatactttgggttttttcagatccaatagcaggagcatccaggcttttaaagctgtgggatatgatttctgtgtatttgggctaaattaatttgtttattgataacctcagttgttatcatgctaaactgtcagaattggatgtgaagccagtgcttatgtagactttatttatgtctggcttctttctgaaaacaattcctcctcatgccctagtttcatgttgtgattttagcagaattaatctgaaatgactcaaaattatacaattaattgcattcagcttcaattacagtctgctggatgaaccaagcccactgccctctctgggcagtcacttgcatgtggcagctttgtaggtgctaaggccctgtggactccctggtcagtgtgctggcttcctggggaaagcattttggggttgacagtcccaggggcctaatgcctcagttgcagacaaatgcaggctggacctggggctgcaaaaatgccaggtaacagcgaagaccatggaggtgagtgtcatggaatttgggataaatgataaaacattcttttcttttttagtagaaaacccagatttgggtgtttagggttggagaaggcaggatctgggtaggtgtattagtctgttttcatgctactgataaagacatacccgaaactgggcaatttacaaaagaaagaggtttaatggactcacagttccatgtgtctggggaggcctcacaatcatggcggaaggtgaaaggcacatccacatggcagcagacaagagtaagagccaagcgaaacaagtttccctttctaaaaccatcagatctcatgagacttcttcactactacgagaacagtccaccatgattcaattaataactcccactggctccctcccccaatgtgtaggaatttacgggaggtacaattcgagatgagatttgggtggagacacagctaaaccgtatcagtaggtttaaggtttggaaggtggccagccccagggcagagaagcttctactggagattccttcctttctcctttttactctgtgcaattgtgggccctggggtgagccaggtgagggcaggtgcctgaccacaggatggaagggccggcagatggcggacccaggcagcagtggagggaaggtgggggttgaggggatgcagagggctgagagaaactggggatggagggaactgtggtcgatgcagctataggtctggacttatttttcccagatgaggaatatctttaagtccacataagtgagtcagggactgcttgtattcaacttgtgctcctttgaaatgttcttattctccccacgaactgactttcattcacaccgtctatttggcaatacatgaccgaatttggagcctagttctttttggcaagaaaagttcattaattttagtcggctccccacacacttcacaaatgtgcttgaaaaaataaagggcctcttatcgccacacagctgccacgaaattgccaggagtgctgagtgctcacatatagaagacggccatttatgttgatgctgtgagaagaaaaggtcccccgaagcactttgaactggagctgccaggaaaatgatggtaaatgcagaagcatcagcgaagccataggctttatgatcatttatcattccaaatttctaaggattatcttcatctcttttattctgtaaacactgattaacttttaaaggtgatggaagtctggctgagtcaaacttactcatccatcaacttagtggacttggagaaaaggccctgctgtgacattttgattaactgggatcttacctgtgtggggttttctttccacttaatatctaagaacacaagggtgggaagaaacttcagtgcctgcctgccttctgctcttttcctcatctgtaaatgaacatctgagaagggagtgagacgttcatatcagcctgtgcagtaggcctagctacactcatttatttgctctctcttttctgatttctctctgtactgggctgaacaatgttccctcaaaattcatgctcgtccagaacctcacaatgtcaccttatttgcaaatagggtctctgcagatgtaaatagttaaggtggtggtagattagggtagacactaaatccattgactgttgttctcgtaagaaggccaggtgaagacacagagacacacaggaggaaggccacgagatactggaggcagagattggaacgatgcatctacaaaccgaggaatgccaagatttgccaggagccaccaggaactaggagtgaaagatgaggaacagattctttctcagagcttccagaaggaaccagccccatcaatgccttgattccagacttttgtcctccagtagcaattctgagaatagattcctgttctgagttacccagcttgtggtactttgctggggcaaccctaggaaatgaataaactcattgtacttctgaggtgtctttgttctctttttaataccaggtatatactgctgctcattctaaatttcctcttgtccaacccaagtttaagagccgtaagtggcctattctaagttttcttcccatccaaggctctataagaggccattgccccaaaccaagggtttggaatagtcaaagatcctgcccagatgtgatgcccaggtgttctcagccgtgggtttggggatgatagatctctaaaactctcgaacatctagactttaaaattgtcatcccctgtgctggcttccaaccacaggttctgtgctgcttccagctcccttctctgctgttggagattatttggggactgactgcgaggcaagtgaatgaaatagatggcagaaaagacaaaggccaaaaaatccgctgcacctactggcttcccagatggtgtccaagggatgaaatagcttgagccctgggccacaccatatttctgtcctgactgtagctgttttgctaaggagcccgtactagccttggaggaacagctttcgatgctgcaaggaaagcacagagtggggatagctgatgggagttgtttcagtggtttaggctgacttggtgattctaggtatgccttaggccagtggctgctgcttcttctgtacatgaatgtcatgaatgtctgagtagggagtgagaggttcatgtaaaccttttatgttgtaggcccagctgtgtggccatgggagggtgcttggcatgattaggatggaaaacttttttgcctacactgatcatgccagagcgatttaatatttcaataagaatttaagggatagactcatcttggagtcgtcgtcttggcctgttttctcaccagtgttttgggtgtttgtccaagagaacttaagagttcttaactgagtattttgggcctgtgggggtcaggagaacagcatgttttacctctactgaaggtaggagctaccttggcatttggggtgaagagatgtgtggggtttcttagtgtaggggatggtcgtggagcctgggagacctagatggctcagttcttctaatttgttgagccttggtgcatccctctcttggggtgatgataatggtgccacctcagagggctgttgaagatgtgagatgcatatagaacacagcatctggctcgctgtgagctctctggagaggttagccattgagatggtttggctgtgtccccacccaaatctcatcttgaactgtagttcccataatccccatgtggaagggacctggtgggaggtagttgaatcatgggggtagttacctccatgctgttctcgtgatagtgagttctcatgagatttgatggttctataaggggcctttcccaccctttgctctgcacttctccttgctgccagcatgtgaagaaggacatgtttgcttctccttccatcatgattgtaagtttcctgaggcctcctcagccctgcggaactgtgagtcaattaaacctcttcttttataaatgacccagtcttaggtatgtcttttttagcagcatgagaacggactactacagccatgatcactagctgagtgtgctgctggggtcacctgctgtactcctgcagacctcaatctttacagagtagaaaaatgaagcctgatatcctcatgggctctttttgtatatcagaatctccgtcatctcccacccaccaaattggtttggagcaagcaacctgacataaggagtatgaccttcacaaagtcatgttgtgtaagtagcagtttcccaaactaggcagtgtaagtgagagctctaaaccacttagtggatgagggtatactgattttaatttttaaaagttgagttattattggaacatgaaagaaagcctatttcgcagaatcagccagtgaggcattccttcttttgtcaggatcttgtagttgctatgtcaattaatctgctttctatttaggccattgaaataaagttatatctaaaaccttgaagtaaggtacaaaaagtctacagcttcctggaacacagcctagacgctggagttaaacaaaaatggacacaggggtcttaagaccccccagtagaatatgcaacactgctagggtgccttgaagatcctttcaggtttgtcttcttttttatctctttattttccttttttttttgagacggggtttctattctgtcgcccaggctggagtgtagtggtgcactctcagctcactacaacctccacttcctgggctcaagcaatcctcttgcttcagcctcccaagtagctgagactacaggcatgcaccaccacgcccagctaatttttgtatttttagtagaggtggggtttcaccatgttggccaggttggtctcaaactcctgagctcaggtggtccgcccacctcagcctcctaaactgctgggattacaggcgtgagccaccgtgccctgcccctttcagaatcttctgagaattgtcttactgtaatattccttacacatttggttaccgactttcccagtacgtcattggagaaagcaaaggcaaaagggggaaggagagaagtaacatttgttaaatgctaactgtgtgccaaccacttgacatggtgcatgttatccccattttacagatgggaacgtagaggctgagggaggtaaagtaacttgattaagtttaccctgctatgaagtaatggagttgggatttgaaccactaaggaacacactcaggtattgttaagtaaaaaaaaaagggataatgattgagcacactggcttacgcctgtaatcctaacactttgggagattgaggtgggtgaattgcttcagcccaggagttcaagtccagcctgggccatctggcaaatccctgtctcaaaaaaaaaaaaaaaaatacaaaaattagctggaggtggtggtacacacctgtagtcccagctactcaggaggctgaggcaggaggatcaattgagcctgggaagttgaggctgcacggagccatgatcatgttattgcactccagcctggatgacggaactacgataacaacaacaaaacaaaacacatgatgaatacgcactgaaagatcaaattagattctctacctccgttgaagaaggtaaaaaagtatatagtagaatccctcagaaatatgaatggttagaattatttttaaagttttgtaaatgtggggcaaatttctattttctggaaaattcttctggtggaacaccttgctctctaaaagtgccagataaatgagattccgcttgatttgagagctaagttctatgtccagttcttccttgctgttattaagcagcaaagagagacccatggttgcacactgggaggcttttctctttatcgttactgtgtttatagacccgactccatcgggggtgcttttaagtaagtaattattttggggcattgttgctctttttcgttcagtgcgtaagtatcactctctactgctttctgatctttttacttttatttttatttttattttttagtacttccaagtgagaagggatgtggcctcccagctggtgtttgtcagggttacatggtacatgtgcaggaagggccacatcagcaggccttgagtaatccatccgcagtctcgaaggatgaatcattcatgaaagcagttttccatcccgctcactggatgcaagcctttcttgcaaagttgatttcttttgcaaaattaacctttgctttctgctccttgcccacacagcttttgaaataggaagcccacagagttgtgttgtttttttctaagtaagtctaacggactgggcatttgtaacttcaattattacgcaaggtattgaattccgcctatgaaatctatgaaggtcattgcccgtggacttagaagtgcctagcagagttgaatggtatgtgggctgtgtgtgtatgatccatatggctgaagtcgtggttcttactattactatatgattatgtatattttaaaaatagctccttcagattttaactagttttaaaactcaaagtatgtgaaagggtttgcatttgatagaggggggaaaaggcatacttaatatccagggttgataagcgaaggcgtgccacctcctgtaagtccacccctttcatcctttacccccatttctcacactacttttttggtgttttgtgcgtttttattttttccgaattgcagcagtgcagacagggagaagaactaaaatcactctatagctggcctctgctgctcattacgttttagtgggataaaaccttgtcttgccctcctagttggagaaccagctgaattgcacctttgaatgttgctgggttttgtgccaacctgccagctgatggggcagaccagcagcttagtgtctcctttgctgtggaagcagaactgcgtccccattatttgacaggcaggaaacggtaaggctagcaaagcggggactgaagacttcaggtgtcccagctcctaccccagaggttggtcgcagacacaggtttataaaacatcagtatgtggagccaccttctctgaggttgtcttgttgtgtctgtttcttccttagaaaagcacatcccagatgggcatgatggctcacgcctgtaatcccagcactttgggaggttgaggcgggtggatcatttgagcccaggagttggagaccagcctgggcgacaaggcaaaaccccatctctacaaaaaatacaaagattagccgggtgtgatagcacacgcctgtagttccagctactcaggggaatgaggcaggagaattgcttgagcccaggaattcgaggctgcggtacgctatgttcacgtcactgcactccaggctgggtgaaaaaatgagaccccatctcaaaaaaaaaaaaaaaaaagaaaagaaaatcacatcccaatcctaatacttttaaaagttcatgtgccaaatttaatattcaagttgctaacatgttatctgtatgtaaaaaaacctgttcttctaaccagacttcttccagacttgttttgatcagtctcaaccagcatatgtcattggcacatttaagcacaggtatgtaatttttagcaatagtgagatgttctatagtggagtgcccgtgtcacctgagttgtggtgaacagtttcaaatatccttcattttccagtattcaaaaatgaggaaatgacctcagatttcagtgctatgataattcccctagttatctcctaattctgtgcttattttgtgttgcagcaagtgaagctcagagagctcgcgtgctaggtaggcactaagtggtaaaaatgatgtaacattttctggggaaatgtatccaaagatcaatttgtaatagaaaaacagtattcactgggcacttaggtttatattatgatagcagatacttgagaaccttcttggcatagaggcattctgtgggtttcatggtggcccatgagttaattggcagctggagtgtgaagtaattgaaataattgacccctgagataatgggtgtataggcactggggttcctaactatcgaggaggagactggggttcctaactaccgaggaggagactggggttcctaactaccgaggaggagactggggttcctaactaccgagcatgcttctatgggatgtcattgaggtgtttcctgtttccgtgaacagtgtctagttttttcttttttgaccctctattttcatcacttctaagatgagaccttggttgtgggcagagggtgtgtgatatattcttttaaacgtcgggtctgcttccctctgtttgaactcaagttggacagacaaatcccttcatggatggaagctggctggtgctctgcggtttctgagatcagtgcacaaggccaaacccagtttgtcaataacagcttcttcctcattgttttatgtttctaatgaaacagctcctattttgtagtacacaaaggggaaatgtgaggctggaaagcaacataggattcttcattccagacagcagccagtgggcccgctcatgaaaagttgatggttgtgcttaatgagagaagaaaaaaggcatctaatagctaaagtttgccttaacataataattacttcccatgtagcagttccatttttctaatacttgaatgtcttattgtataagaaagcaaggtacttatttatttttacaaccttacatctagtttctgtgaacgttttcattgtataaatttgtttctttctcaaaatagataaaagacaccaaccatcttttttaatctactgaagcacatgaatagtgcttatgtccattttaggatacttttttgtaagccatgatataggtcttccccaccaatggtggcagcttctttagaggcaatttacaaaaacacgaacacccctacctcccacctatggtttttgctttctataaaaatgttgaatatgtcatagctaagaggaatgaaatgtcctcctgcagagaataagaatctcttattaaaagtagcccagaagtttactgttggtgcttagaaaataattgaaggatgtggaagaagaattacaaagacatgcacacacatgcacgtgcacacatgcaaacacacacacacacacacacacatttatgagtcactgactggcaatcataataaattatttccccagaatcaattgtaagcctgcagactccagagaggttggcttacccggcctggagcagtgctgggtggagttgtttactctcctgtggcagccttagggctcttgaggtatatgtgcgctcttagtcctctgttatcttctgtcaccgggagacaggcaacatgtgcaccagaaactgctgccatgcctgtcgccctgtataatgtgcagtttttgctgacttttctctgaaaccgtaagaaaagatctagtgactagctgagtcacttgaactatgtgagttaagtcacttgaactacacgagttaactgagcaaacttgcagctacccaggaatttgattttgtatggtgaaattcttagccttgattctgtgtttttttttttttaaatttttttatttttttgagacgaagttttgctctgtcgcccaagctggagtgcagtggcatgatctcggctcactgcaacctccgcctcccaagctcaagcgattctcctgcctcagcctcccaagtagctgagattacaggcatgtgccaccatgcccagctaattttttgtatttttagtagagatggggtttcaccatgttagccaggttggtctcgatctcctgacctcatgatctgcctgccttggcctcccaaagtgctgggattgcaggcatgagccactgtgcccagctagtttgtttgttttgtttttttaatttattttttagagcagttttaggttcccagcaaaactgagcagaagatacagagatttcccatgtacctcatttctctgtgcctgcacagcatccccactgtcatcatccctcaccagagtggtccattcattgcagttgattaagctgcattgacattattatcacccaaagtccacagtttatggaagagttcattcttggtgtatcttctgtgagttgtgacaaatgtatcatcatatacagctactattctagtatcatgcaaggtatattttcactgccctaaagatcttctatgctccaccaatagaagatccctttttcttccaacccttagcatccattgatccttctattgtctccatggttttgcctttttcaggatgtcatgtatttggaatcctgcagcatgtaaccttttcagattggcttcttacacttagcaatatgcatttatgttttttctatgtcttttcgtggctggatggctcatttctgtttagtgctaaataagattctatcatctggatgcaccgcagtttatccattcacctactgaagggcgtctgggttgctttcaagtttggggcaattatgaagaaggctgccataaacatccgtgtgcaggttttcatacattttaaactcatttgggtaaatatatgacccactgcaattgtggggtaaaatggaaagaatatgtttagttttttaagaaactgccaaactgtcttccaaagtggctgtaccattttgcttgccctccagcaatgaatgagagatctcattggtccacatccttgtcagcgtttggtgttgtcagtgttttggattttggccattctaataggtgtgtagtggtatctcattgctttaatttgcagatccctaatgacatattatattgagcatcttttcacatgcatatttgccatctgtacatcttctttggtgagatatcaggtcttttgcccatttttaattgggctgtttgttttcctattgctgaattttaagagttatttgtatattttgtataatacttctttatcagatttattttttgcaatattttctcccagcctataatatcttctgattcttttgacagtgtcttttgcagagcagaagtttttaattataatgaaatccagcttaccaattattttttcatggattgctcctttggcctttggtattgtatctaaaacgttattgccaaacccaaggtcatctagatctttctcctttgttattttgtagagttttacaattttgtgttttggtttttttaattaaatacaaagggattggtggtttttgtttcttggtagaaacatagtttgtttctttaccagtgacataagcaataacttaagtaaataaatgaatgactaggaaactctttgactaggccaacccccatagccttaataaccacaacttaacatttgcagaataggaaggactaatcctttaatttatcttttatgtctatccagaactttagtcctatgagctgttttgtaaacgagatttgttttgtgggaaagggaattttgtttcaagacttccctaagaaactgatagcatcgggtaattcttaaatttgacttatcataatggtatatctggaaggaatttgtcaactgatatgttataattattttttaattttttttaatttttgagataggtcttactctcttgcccagactggagtgcagtggtgtgatcatggttcacagcagcctcaaactcctgggctcaagagatcctcccacctcagtctcctgagtagctgggactaaaggcatgtgccaccatgcctggctagttaatttttttttttttttaagtagagatgaagtcttgctgtgttgtccaagctggtctcacactcctgagcttgagcagtcctcccaccttggcccctcaaaagtgttgagattacagaggggagccactgtgcctggcctgatatgttttaattctaacagtagatctgcatagagagaaaagttggtattatgaacaaaggtagctttaattcgaagagacaaccatccccattccacaacctctttccacccaagcaaggaaatttattgaggccagtaacattttaaatgctttttggagttgtttatttgcatgtactttctttcttattgtgtaagatttgacttttttttttaaaggagtttcttcacatggataactcagtttgtatagcctaatgtaatctcagcaataagtcaaaagctgttcttctgtagggctatatagttctctgacataggaaatcattcttagttccattatattgagaagaaacagagaagcattttacatccaagtgcaccagcagctgttttgttacatagctgctgtgtgcagagcccaatactgagaattttaagaagtcactgaaatatgtcgaagcacgaggatgggtctggatctcctcactctagacgcctgtaccttttttctgtagtcggtgaatgaaattttggaacatgaactgcacgtgtggaaagaatttgtgtgtgggtggaggaagcatctaatgggaactgagctgggggaagtagagcttggtcccaggtgtcccagctggaagagtttgaagccagacccagggagccctgcttttgaggccacctgcactgctcacaagccacgggccttgggaagccctttctgggaacttgcttatggagctgagatgggggtcagaattattctgcaaagtggttcccactgagcaacaagtgactttctcttcctccacgttttcttctccttacctcaaaatggaagaaacttcttggcaaaataccatttaacataatttggccacactgaacatttaaaaataatcaaagatggagtctgtgctgttaagaattgataagtattccacataaaatctaaacatcgttcttttctttattaaatttttggtgtaatgcacaaaaacttgaaacttcagcttttaataaaattgactttatttctaaagagaagtgggaataacagtggtgctaagattagcagtaaaagcctttaacctgcgaattccttcacgctggggtcaaagaagggaagtccacgtggatgtttgacttgtgacctcttccttcatttaaaaaaaaaaaagacttaaattactcatgccctcagtttaaatttgtgactggcatttgaaactatggaatgattcacttttccttgtagcaagaaaatttgaaaatgaaagcaaaatgatgctcatattcaaactgaacctactatgaaaagatgtttgctgatggtttcgttgccctgcaaacacacacgacagagatggctgttgttcaacacattattttcctcttcctctgagcatcttagagagggatgactgtgcatgttgcctcatgcgcaggaggtggtgtgcaaagatcttttggtttgtatcgtggcttacaggctctcatttaggccatggcatggtacattccaataccatgagtggttaaatctcaggaattccaaagtgtatgaacggagtgatgtcagctgtactctcatttcatgctatgtagccagatgtcgtgtagctaacctcagcagttactatacataatgtgctataactggctgatttaaggtaaactgcctcagtttcctcatctgtaaatgatggcttttgactaaataatagcttagttttcattgtgaacaaaatgcttgtttagctgggcaaacacatttttttttgcagaaaaacagccctatcaccaatagtacctgctctagtgcttttaaaaattagaatgaaattttgtttgtacatttttgtttgtttttgacagtctcactgtgtcacccaggctggagtgcagtggcaccatcttggctcaccacagcctcaaactcctgggctcaagcgatcctcctgcttcaacctcctgagtagctgggaccacaggtgcatgctagtatgcctagctaattttttaattttttgtggagatggggtctcactatgttgctcaggcttgtcttgaacttctgggctcaagcgatccccccgccttggccttccaaagtgctaggattacaggtatgagccactgcgtctggccttggttgtacttaaaaaacaaaaacaaaaaattaaaaaaaaaaacaacagaaaacttttcatggctcccaggagcatttatatgactaacaagttatctttccttgctgatagttccactttcctcgtgtttgacagaaatgactcttagtttaggaactcctcattagctgtttccaggagcagtggggtatcattttgatgcttctttatttcttctatgcaactaaaatacaaagtgaagatacgatgtctctgaaatgataaagctacatttgtcaaaaagcacatattttccattcgacattttggcttaaagaaatgaaaactacagaatgactttttcctttatctgggtctgtgctgtgtatttacctatttaaaaagatatacaggtgaaaaatattttttgaaatgaacttgtctgaatcaagatgcacactcttgcagcaacatcacagggtgtctctgtcactgaggactctgtcctcatttgtgtgggctgactgggtcgctggctgtgggaggcacacatttgctatcttggtgcagcagtttgtagtcagctgactgacttgttcctgcacatgcattttttttcctggcaagtcataattcatgtttttcctaaggtccaaccctattataactgacagatcctatctggctgagaaacatgggcacccttctgtttttgcctcttgttcccaacatatttgtatgcttttcaataggaagctgacctggagtaaatgcccagggttgtctgaggtctctaaatggaaggtgtggtctgaaaccagctaactatggcagcattagggcaagagcgcacaggtaaaggacttctgaaggagggtggagggtgggaaagtgggaggggcgagagctaacatgaatgaaactgaagagaaacagaagttgtggctggcatgcaggagaaacccagattcccattcaccacttcctctcacctccagaaattacccatcattcctctctattttgcaatcctctctatttcccctgaaggttctgctttgaatgctgtcttcccagcagaaatgttgaagggaagtagctcagcccagttcccttctgggccaccactttcaactgtagactttctagtcagagccaagaaggccatggactctgagaatggcatttaaagtctctgccgggctccacttagttccccttcccctacagatgccttattccctcgaaatgcaaacgaggctccatggccacagtttccttcctctttctgtccacattccagtcgttcaccatctcgagaacactggggcaccctcctctacccccagccagagctgtcatttagttgtgatccacaaatctgctaaagagaaaggtgccctgctatcattttgcaaaggcttgcttggaacacattcctgccattcttttttgctgctctgtagcctgagtgattatttgtttagtgtaggagtaaatatgaggggtgctgtgtttcttaaaaacaaaacaaaacaaaacttttagtgacatatgctcattgggggaaataagatagaaataaataatattgaaaacaaacacccgtcaatcacgtgacaaccacaatatagcactttggtgaaaatggtcttaatttaaaaaagaaagtccatctttctaggtatctgagcaattcattactattctatgtaatttttgtgggtttataattaattttgtagattgggatttactagcatgtgataccttgtaaaggacattttacattaaattatcttcctccctagcacattgcctaattctgtcacttgtattattgaggaaacatttgcaagtaggacaaaaagctgtctgcaaatacttaagctttgagttgtttttttctgaagtgcgaacacaatcaattgggttaagtctcccagcccctaagtgggggtatttatgttttttttaggagagaaactttggaagtaaatcagaagtacccagggccaatggccagagtcttagaggaaacataaacctctaggatccagtgagtatccacaaacttagagcactgcgaaggaaacagttgggttagcgttttattaggaaggtcagagatgatttagaaagttaacccttccaaggggtaattacccccaatatgtgtccgttgtggcatgctgtgtacattcactacttttttttttagtgggaaaataacaacatgacttggctgcatgtcccaggaagaggccacagaaatgaaacctcagggtcacatgaaggagattcccctgacatatttcagagctgatgcttaatggacctgaaccagtttgctttttttttttttttttttttaaaagacagagttttgctctttggcccaggctggagtcaagtggcacaatctcggttcactgtaacctctgccaccccccctccccaacccccacccccgccaacctggttcaagcgattctcctgcctcagcctctcacgtagctgggattacaggcaccccccgccaccatgcccgtctatttttgtatttttagtagaaacggggtttcaccatgttggccaggctggtctcgaactcctgacctcaggtgatccacccgcctcggcctcccaaagtgctgggattacaggcttgagtcaccgcgcccggccccagtttgcattttttacagggcagagactgaagggcacttagagctacctggcccggcctggctttagggacctgatctgtgcagatatggtaattccccacgtgtcaatgcagttcagacttaaagggcacagtcagcccttcgtttcaataccaagaattgcccttttgaaagggtcttgaaggacttgacattctaggatttaattattagggggacgagcagaggcaatgagatgcaactctgaaacaaatgtttaaccacttgagtcaaagaggaaacagagtgaattaaaacttgaaaagtgatcttcaaatcggcttccgcccttgtaggctgattagacgacaactagcatctccaactaagagtgtgtataattagaaagccctctaggttatatctcaagtgagaaaagaaatatgcccttttcttagcctttccttatttttggcctgtatttgggaacttttttttttttttagtttagttttttttttaattgtacttctacaaagtgctctgcaagttgcatgagaatacatacaagagctttagcttcatttaggacatattctctcattcctgaaacttcagattaatttagcatttgatgacctaatattgcatttcctcaattttgttctataagtagcattcatcagagcaaagtttattttatgttggtggcattcagtaagtgatacatcacaaagaaagattggatactcttgcatatcaaatatactttgaactgtgttctctggcaatgccatagattttaactgcaactgacaacttgtacttctaagagagcatttatcattgttggatgtgcgttgtgtctgtctgctaattagcttgtgaagtccctcaggttattcatctcatagaggccagtgtctggcacagaataggtaaccactgaaggtatcctgagtggaattgagttgcaacagtgtgttatagacagtatagtccacaaggaaaagtagtcatcactgagcagaactgcattttgcagccctccatgattttaggggagagcaaatgtaaaacacattttcaaacaggtgagtctgactaatttggaaaattgaatggactgttttctaattttttttttttttttttgcatctgggatataaagcaacagtgaaagttactttttaaaaatgggctgaagagtgagaaatgaatctgacttatcaaatccgcagagggttacctttattactgtgctgcccttcatcccatgcctgcctgctttcatgacaagttgcagtgaagtcgtatttggctgtgagaagtgacttgccttcagggtcactgtgaaccatgtgggtggggccgggcaaatgcatatttaagtactataaaatatttagaagcagaagattcaaaatttgaccaatcagtttgatcaagtttaatttctttttgtttttaaggacatggtttcgctgtgttgcccgggcaggaatgcagtggctccatcatagatcactgcagcctggaactcctgggctcaagcagtcctttcctgcctcagccttcagagtagctaggattacaggcttgcaccactgcacctggctaattttttaaatttctgcaaagatgaagtcttgctatgttgcccaggagtggtcctctggcttcagcctcccaaagtgctgggattacaggcgtggaccatcacacatagcctaagttttactataaccaatgaggcaacctccatggagaccaagaagagggagtggtaccttctagacatcttgacctttgtcttctggttccaggagctgctatcgctaggaaaaggaagtcctgtctgctcacagcccacccgcctctgcacaggtgtccctgggttggctcgttgatggtagtggtggaaattgtctcagtcattacttacagcctgtgaatcctattagcatttctccaattttctctgtttttatcaagggaacagaaatccatcatcaggtatttccacaaaattgacctcatagttccttcctgggtttaatgctcagttgccaaaatagaagtgaagagtcagcagagttgatgtgaagtcacttggagtgaatatcttcaaattaacaagacgtaacatccctttcctgcctttagcccacaaatgcccacctctgctgagccaccttcttgcaaaggaggcttttggaaaagatcttttgggattatgtgaggatcccacatataaagtagcaggagaatctcgagttccatgggaaatgactataggtcatttttccattttcagagaaatcagtgcctttgaaagagaccatagctttttttgcctccgaccgaacttgcctaatttgtggaggtgaatgaggcagcctttgttctctgccagactttagtcagagcccttaagcatggcttgttgtccagagcatggtagagaaatttagagcatcatcgtaactgtagcaccaccaaaaataataaccacaggagctaccattatggaggaattgccccatgccctgcagccacctctcctcctccactcccccactcccccattcccccattcctccttcttctcctgctccagtattgcatatttttacctgactctgcagcgggctgcctcccccggtagctcactcctttgacctagactttgggtctttgtagctctggtgcttgtacctgctccctctgccctgggccaggattctcagtctctgggattggcctcaatctctgtgtttccccagtaccttgcttaccccttcacatgcatgtggattgcacggactcgccctggcttgctcacatgaaacactctcctacccatctcttcctttcagctggagccgctgtgcccatttcagactctgccttcacacctggactccagcccttcccttgtaacagcctcccttcaggaagagggtgtcttgcagcctagaccctcagttaccagagtccctcagaacagcctttcccattctactgttgttcaagtgtgttggtagagaaaatgagagcatcatgataactgcggcaccatccaaaatgataactgcagtagctactattaaggagtatagtgtctagcagctagtgttttggtagaaactcaagccaacacccctgtaatcccagcactttgggaggccgaggtgggtgaatcacctgaggtcaggagttcaagaccagcctgaccaacatggtgaaaccccgtctctactaaaaatacaaaatcagctgggcatggtggcacatgcctgtaatcctagctactcgggaggctgaggcaggagaatcgcttgaaccaggaaggcagaggttgcggtgagccgagatcacgccattgcactccagtctggttctgggcaacaagagtgaaactccatctcaaaaaaaaacaaaaaagctcaagccagaccgtcaggattcaagctcagtctcacacatatgaactgtgtgactttgcaatttactacttcttgccacatcactctttctcatccttaataaataaaatcatttatgaagaagattattaataccatcagtattatgaagactattactcttatcgttgatccttattttctcatgggacctatcaagttcaagtgacctaacattatacaatttaacctattcttctgcagcaacacacccagatggggaggaacccaataacaccgatggtgctattgacatgctcagaactttccagtgacattgtctctgttttcttgtatatgtgcatgcatgaacaagagctttaaaaattgatggggaccctgggctgctggctaaggagctctcctgcctgatgcccagacaatgttgtatctatatacatttgctgggaagaggagtcagcctagctggaaggctgctattgttatgcaaattggaaaagcacacttttaagctacactcttgcaaaatggctgagggtggcagtgtgcttagggctccagaagagtttaatcattgtaatgaatccaatggaaaaggaccaagtttgctgcttcaagatccatattccaccttcagctgtaaaatgtgctgcagatattgcacttgcctgaaataaagcgctctctgtcttttcttcttctgaagaatcctttggctgtgttttattataccggaagcccatttcctcaacttaaagtaattattaacaacaactaaagctttttctcaatgtggttgaattcggtagttttaggattcaggatggatgtagaaaaaggtttgtgtgttgcgcgtaacctcggtcgtgtagagtatgtggatgctttcaccagtattcacatggagcagttatgcaggatctgcagcagcaacagctctggtgaccactcagtcctctcttctccatttccaggtagaccttacatctttctctctgaaagtgagctgaaatctgataccctgtaacctccaccctttgtttctgcaggatttccatccttcagggacaaacagaacaagcttaatccttctggcaaatatcaggtcttcaggtatttgcagacagctaagttgcaagctgtcttccctttcaggtgaatcccctactcctcttaggaagtggtttccagtttcattctcttgttggaaaacttatgccagagagaggctgcaaccacaacagtgagggcttggaaccctgaaccgtgtctcaggaggagtgaataaagatttgttgtatggaactctcacctcctccatcctagataatatacctctgttaatgcagtctcttctcctagtagctcttttggcagccatggcacctcattaatgtgtttgttaaaatgcctcagtcttttcatctgtggtgctgtcgatctgcatttctgtagttttgaagctaggtatggggattttcgaatgatccttattactcagtggagtcttgatcgctattagcttggtccagttttggattttcctgttggtttctaatttagccatgcaggatgtgtactgtctttcccagcttcccatttcccatttgagacatttgccttgtgtgagttcggcatcgaggtatggaaaatgaagcctcatagcagcctgttacctctcctaaaccaatccccctgtcagctcacatttaatgcggataccttttatcttgggtacttgtcagaaggtcttcttgatacctgtgtcttacagatacagctaattgcacattgtaggaactgattaatgcccaggggactgagtgccatcacacataattgtggaacgagagattttgattgcagtcaatgaagattttcctccctaattgtgaggggtcctttttaaatactattatacctgattttcttcttattttttagtttttattttttgagatggagtcttgctctgtcgcccaggctggaacacagtggtgcgatctctgctcacttgcaacctctgcctcccaggttcaagtgattctcatgcttcagcctcccaagtagttgggattacacgtgcctgccaccaggcctggctaatttttttgtatttttagtagaggcagagttttgctatgttggctaggctggtcttgaactcctgacctcaagtgattcgcctgcctcggcctcccacagtgctgggattacaggtgtgagtcaccatgcccagccaattttcttctactcttggactggaaggggctctggtttctgctaccttttctacctttagatgtacgtggtcacactttgagggccttcagttggtgttgaagaggagatggcgggcccaagctctgcaagcctggtgcttgggggcatgttgcctccctgctgcacagcacttcctgccactgtcctggtcaagctgggtttcccgatttacggaagagcttgggctcagagggaggccgtgaggagccccgagagaatgccagccaaggccctgtctggtctaatcctgccagagcctggcctttgggtggaactgggagggccggggaagaaggttatgagaggcacaagctctggttctctgccattacctctcagcctagaagtggccattggatttctttgtatgttttctctttatagtaaataaagaggaaacttctcccctcactggcctgtgtaggctacagttgcctgaggctcaggcttgcctgttcttctaatcattgaccttcttgttagttggattctctttttcttcatttaaaaatacgccacatttcctttccctcagtcttgttgcaagttcccaataattttggagtcctgttaaaagacctgtactttttataaatttgctttcccttcaatctggagaaagagaagaggaattacttgtagagtgggtactgtgtctcagagctaggctgaagcttcacgtacatcatcctgtctgtccttaacaatcctgcaaggctggtgatgctaatttccattttagagtcggaaacagttgagaatgagagcttcacatacccaaggtcatgcagctggagaataggggtgtgcagatgaggacacagggcactgtcccacccaccctaccaggacgaggggcttcatgctaaactctggcccattagaaaccacttgggaaacataaatgcccacggatacagccatttcaaagatccatgcttagaccagaacatttagcacaaagcgaaacccacagaaacttcaaaaggaataaaaatatcatgttaatgttaagaaaaattatttaaaatttggaaataaggcataaacgtaacagcagcatgtagttcttcaaatgttagccaggggcgttgcttaacaagcctacccaagggttatttgtttagggtgtcatacctggctttgtttttaacttttaaaaaataacaactttgtggccgagcgcggtggctcatacctgtaatcccagcactttgggagactgaggcgggcggaccacctgaagtcaggagtttgagacaagcctggccaacacggtgaaaccccgtctctactaaaaatacaaaaattagccgagcgtggtggcgggcacctgtagtcctagctacttgggaggctgaggcaggagaattgcttgaacctgggagacggaggttgtggtgagctgagattgcaccactgcactccagcctgggcaacagagtgagactccgtctcaaaacaaaaaacaaacacagctttgtaatataattcacgtaatgtacaattcacccatttaaagtgtacacttcaggggtttctagtaatttcagagttgtgtaaccatcggcacagtcctttttagaacattctcattgccccagaaagaaacctgttagcagttactccccattctctaactgggcagacttctttcggatgtatttattggtggactctaattcttgtttgacctagctttaccaacttagttgttccctctctaaaccaaaaagtacccgaaacgtgtctcaatcaatttagaagtttattttgccaaggttaaggacgtgcgcccaggagacaggtctgtgcttttcgccaaagatgattttgagtgcttcaatgtttaaaggggaaggaggaagaaattgtaaaaggtgttggtagataagaggcagagagttgcattcttttcagtttttcatcagctgttcacatgtgagagggagtagaggaatagtcacttgtgcattcctctagctccgtgaatctgctttttttgtttgtttattttattttatttttttgagatggagtttcactcttgttgcccagactggagtgcagtggcacaatcgcagctcaccgcaatctccgccttctgggttcaagtgattctcctgcctcagcctcccgagttgctgagattacagccatgtgccaccacacctggctaattttgtatttttagtagagacggggtttcaccatgttggtcaggctggtcttgaactcctgacctcaggtgatccacccaccttggccttctgaagtgttgggattacaggcatggaccaccgcgcccagcccatattcaacttattttttaaatgataattcataaaacactttaggatcttgcattgcaatagcattgttatgaacattgctctaaagttaagatttttagtttcttaagtaatacattaatggttgaaaaaattagagaatatagatgaacaaaaataaaagtaaaattaaattttcccaaacactgccctagagacagccccgtatcacgttggtctgtgtccttatagactttttctcttgcaacaacttacagtatttttaaaacagtaaatagccccacatcatgattattgttaaatataagttttttgaagcactgtgtataagtgtagattaaaaaccattttggtttactgtaaaaactctggaagacaacctaggcaacaccattgaggacataggcatgggcaaagatttcatgacgaagacgccaaaagcaattgcgacaaaagcaaaaattgacaaatggcatctaattaaacttaacagcttcttcacagcaaaagaaactatcaaccgagtaaacaacctacagaatgggagaaaatttttgcaagctatgcattcagcaaagatctaatatccaacatctataaggaacttaaatttacaagaaaaaaacaaccccccaaaaaagtgggcaaagacatgaaaagacacttttcaaaagaagatatacatacaaccaacaatcatgaaaaaacactcaacatcactgatcattagagaaatgcaaatcaaacaaaataccatctcacaccagtcagaatagctattactaaaaagtcaaaaaatattagatgctggtgaggttgtggagaaaaaggaacacttttacacttatggtggaaatgtaaattagttcaaccattgtgcaagacagtatggccattcttcaaagagctaaaagcagaactgccatttgacccagcaatcccatggctaggtatatacccaaaggaatataaattgttctgttataaagacacatgcacacatatgttcattgcaacactattcacaataggaaagacatggaattaacctaaattcccatcaatgatagactggataaagaaaatgtggtacatatacaccatggaatactatgcagccataaaaaggaacgagatcatgtcctttgcagggaaatggatggagctggaggcaattatccttaccaaactaacacaggaacagaaaaccaaatactgcacgttctcacttataagtgacagctaaacaatgagaacacatggacacacagaggggaacaacacacagtgaggcctgtcagaaggtggagggtgagaagagggagaggatcaggaaaaataactcaagggtacatggcttcatatctgggtgttgaaacaatctgtacagcaaacccccatgacacaagtttacccatataacctgcatagatacccctgaacttaaaaaaaaaaaaaacattttggttttagaattctgaataacaattcatcatatttatttttaaattcattttgtcttatattttctggcatgcagtttggaaaggtaatatatttgttttgtaagatttttctttagtttttaaaatttgtgggtgcttctatgccttcatatccttctttgtatggagactttcctagttcctttgtctcgtgtttttccccagttgctctccactgttacccatgggcattagaatcccttggacgccttcagatttcctttttggaggctcctggccccattcctttgtaattatgtggtgttccacgtccctgatgttttattagttcccaacatacttgatataagagaggtaattagtgtattatggcttctttttgaattgttccccaagataagcagagggaaatgttacatgggtaaaaatttacataataatgtgaccaggctttgtcgcaaaagctcactgtaatcatgagaaaatgaaagcattttatttatggaaagtttccgcatgtatttgtctctaagaattaaaaattgccactgcattatggtggcctcagatttcagaagaaacattgtactgtgtttacttgtaccgtgccctgcctttctaaccaaacttgaataccctcttttctgttctgagactgttctatggccattccaccattgattgaaaccaaagccaaaccagaacattaaatatgaaatgctttttccctcacccacaggagctttgtaattatatggcttaaaaaaaaaaaagcactgaattcttaaatgagagtgtttagtaaaatatttggaacagcttcagcttcctactttccttcagtgaaccatggctgaaggtaacgttttcttggtcaatgtgaattgcgttccttcccccggtgcttgattttcctttgacctactccgtctccatagtttgcatgaggtggcccaagcctctttccataattttacataggtgttaccgcagaacgctgccagatggctgcctgtcttggtggggagaagtccctggatctgctgtcctttttcattctcagcactagcgtcatttctgccacaagtcttccctgaactcaaggctgggctgagggctattccccaggcactcacaccttacattggcaagaccttcctccacttgtatgatcctgaaatgttctcttagtgactcttttccaaactaaaagctccaggggggcccctgagcgaagttgatctttacaaccaccagggcccagcaccatatctgggatgtagctattgctcgataaatatttgttgaccagaaggtaagtgaaccgagtactccctatccactgtgtgtctacattcctgccaacccctgtatatatatgacaacgactcttcagtcccaggcctaatagacttgccccagtcagctccttcctgatttcatgtaagagtgacacgattgaatacttcctccttcctgaaacgtttccccctgttggatgtcggggctcctgctctctgctcgcctctctcctaggcctgtctctgaggtttggccaactcctcttgtcacccctccagcactatgagcaaggaattctggttctccccacaccatcttttttgaaattgcattcgaggtctccagcatctcttctaggcagatacctgaagggactgggcttcatgtagtcctcccaggcctgccagactttctggccttcaactaggagcttcatgcgtgtctgtggaaggagtgaccaatggacaaacatacaactctattttgaaagtgggttggggctgggtgtggtggctcatgcctataatcccagcactttgggaggcagaggtgggtggatcacaaggtcgggagttcaagactagcctggccaacatggtgaaaccccatctctactaaaaatacaaaaattagctgggtgcggtggtgggcacctgtaatcccagctgtgtgggaggctgaggcaggagaatcacttgaacctgggaggcggaggttgcagtgagccaaaatcgcgccattgtactccagcctgggcgacagagcaagactgtctcaaaaaaaaaaaaaaaaaaaaagaaaaaaagaaaaaaaagaaagtggatcgagtatgaattatgaaattgcaaagactagaaggatacatgtgggtcttgcaaggccttgcccttgagtttgcaatcaactggcttgtttaataaacaaatatgtgctaaggatgatggctcctcatggaacttagggcatgcaatcattgacttcagaataaaactgtagcttaggacccaaagagaagaacagaggtaaggaagaatcatgagctcactcgctgctcaccccttccagtgcccacctagagtccttcagggatcatagcttcaaaacccttccagtggattctttctgaagttcattctcagactctcagtgatctttactaccttttaaattaggaatgttcttcacaaaaaggaatgctacaggttacttcactgagtacgaggtgaagattccaagtgttcattttctgtgtggctgtatattatttgtgtgggaacccacattcttatctcaccactaaagatcaagaaagtactttcaccagccagcaagcatcacttgtatgtggtcattgtatgattacaacggcaggtaccagcaggtgtattaagcagaacacacacatacaaaggcaatgattttaaattggactttggattaaagtaatatatttaacccctcaagagttctgactgtgttaaactcatttataatcatgagcaaatgagtctatactaatgcctcagatgtttttgaatttggcaacttctatttcctaattgtgatttaggtttaaataactttttcacttatgctcacctgtaatctttgtatgcctttatttctccccgtggaagtattcacaggaccctaattcattagtttggtaatagctctttactgctttggacttaaaggtaccctcggtatttttaacagacacagatgtgctgtcccgtagagctgtcggggaagaatgccttgaatcccgaaccacttgctcttgttcatagtacttaattttcacttactgaatcatttgctttccaaaaaccaccttgttgcatgtattagtttgttagggctgtcataacaaattaccacaaaccgggcagcttaaacaacgaaagtgtgttgcctcagttccaaaggctggatgctggcagggtgggttccctcagagagctgcaagagagaatctgttccatgactccccctggcttctggtggtttcccggcaatctttggcattccttggcttgcagaagcagaagcatcaccccagtctttctccatcttcacatgagttctcccagggtgtgtttatgtccaaatttccccttgcctttatttttattttattttattttattttattttttcgagacagagtctctgtcgcccaggctgtggagtgtggtggtgcagtctcagctccctgcaagctccacctcccagttaacaccattctcctgcctcagcctcccaaatagctgggactacaggtgctcaccacctctcccagctaatttttgtatttttagtagagacagggtttcactgtgttatccaggatgttctcaatctcctgacctcgtgatccacccgccttggcctccaaagtgctgggattacaggagtgagccaccgcacccagcccaaatttcccttttttgtaaggatgccagtcatattggattagaggccttaccttatgccagtgtgaccccatcttctctaattatatctgcagcagccctttttccaagtcagatcacattctgaggtactagaagctagaacatcaacatgaattttatggggatagtttgtattagtccgttttcatgctgctgataaagagatacccgagactaggtaatttattaagaaaaaaaaagtttaatgggctcacagttagttctgcatggctggggaggcctcacaatcatggcagaaggtgaaagtctcgccttacatggtgtcaggcaagaaagagaaggagagccaagcgaaaggggaaaccccttgtaaaactgttgaatctcgtgagacttactcactacgacgagaacagtatgggggaaagcactcccatgattcagttgtctcccactgggcccctcccacaacacgtgggaattatttgagctacaattcaagatgagatttgggtggagacacagccaaaccatatcacagttcaacccctaagagtgtagctaatacctgaaataatcagatgacatttttatttgccaattctgtgtaggagagatgggtagaaataatagtaaattgcattgagtgtatgatcagagactattgagaaaggtgattgttgtcagatcctaaattatatgaaataatttgggggattgtttttgacatatgtcatataaaagtaacttatttcccaggtttcttattttttctgaccagctctttgtccatactgattcaataatttcccaatgttcttcagctaatggagaaaaagagtttgaccacatttgtaaaatccaatctaactaatgtatttatgttttagctttttattatgtacattttcatatatctggaaaagcagagagaatagtataataaaaaccatatactcttcttgcaactttaataattgtcaactattaccaatcttgtttcatccatcttctctccacatatttttcttgctggagtcttattaaggaattgcagatatcctgttatttcacttgtataattttttttaagttagagaaatgtaatgtcatactttctcactgttgaaattgaggagaaaggtaaaactacttaatgataagtattaggacatacaccttggcttttacattgtaatgaatttaaagaaggaaaagcaggagataaaggaggagtggggagggtggggttgggaagagagaggatgtgagagacaccagctcctttacatgtttccctccctaccacgtttccctccctaactaaactctgagctccttgagggcagaaactgtgtcttggtcccccagttaccttcataccttatagggaattggtgtatagtaagtgtacatcagtaaacatttgctgaataattgaatgaataaaagaatgaacgatgctcccccaaaaccttgcatagaaagatacagagacatgctcagaaaaatacaccacatttagctctagaggtaagacaaaagaaataaaaagatcctgaaaggtacattgcttctcgcagttttcaggatattttctctcacatttagatcccgtgtagcatttctgcaaccctgccaagaagcaggactgtcctaacgtgctgagtgcttatgcccttagcgagggagagaggtttcatccatgctgtgagagctcattcttcatttgcattacgtgagaatcgaagcctgagttctgagtattttgactaccttccatcctctcagaattctggagccacactttgttttgcctgccatttgggagaagattggggttgctgtgaagcttaaagtgctacacattttgctgaagaaagagattgcagtctcagatgtccatactgccggcagacctacatgcttatagatgtgagtgacattgaagcaggggaaacaagtcctgttccactacactgaggaggccttggactgaaggcaagagagaggagagaaggcagagcatacagtcccaaagccgagtccagcctccttagctccttgcaactcacactcaaaccccagtttaagtaattccagactgaaaaataaaaaccttaaaaatattgcagagagaagtttggtattagagtcatgataaacccttgtatagaacgtgttgcaatgattattttttagggtcaaaatgaggaaacctgacatgcacactgggttttggatgttcagacatgaagcttgtactgccaagtgaggaaggctttatgcccttaagagattaaaggaaagttggactcatcagttgattctgaaatcaacccccaaacactgcttgatctgagttttcaaaagctaacctttgggtttctctttaaatatttttgcgtgatttgtcatatacttatctttaagagttttgttgttgttgttgtttacataaagcagttaccatttaatgctacaggtactcaagatttcattcatgcatattcttagtcaatatgagaaaaatctatttcattgtagttctgagttgaatatgggaataagttgaaataataaaagaaggagactgtttatctgttggcaaacgtgtcgctgtcatcatctgcatccttctaagtgtgtggcttctgggccatcatgggcgagtaatgaccacatcccattcttatcttttctccttggctctggaaggagtcttttatactggtgattgccggactgttcttgagatttttcttccctcaaccctctccagcccccaggctctcttctgactcttcccacccctcagacagcctcgtcctttctaccatcaaccacaacacttgggtgtttccaggactcgccttgcagttctccctcaccatgaagacatctctcatggcttggtccacagtcccccgttgtcttttggcctctaaccttgaatctccacctgcttgtctgacacatctatctgggtggcctaacagtatattatacttttctcaaattgagacccctgtttattgtttcattatgttttattgatatataatagttgtacatattttgggggtacatctgatattttgatgcagatatcaaaataccatccaaagagttctttggcagcgtgtgcacaggtatcagaatatcagatgcacccccaaaatatgtacaactattatgtatctacatacaatgtgtaatgataaaatcagggcaactgaaatattcatcatctcaaacatttatcttttgtgttgggaacattacagatcttttcttctagctattttgaaatatacagtaagttattaactataatttccctgctgtgctatcgattactagaacttattccttctgtctaactgcatttttgagcctgttaactaactggtcttcatccctttctcctcttttttcttcccagcctctactcgttacctctgtgagatctacttttttagctcccacatatgagtgagagcatatgatgtttgtcttcctgtgcctggcttatgtcatgtcacataatgacctccagttcttttcatgttgctgcaaatgataggatttcattcttttttatggttgaataatactccattttgtagacatactacgtcttccttatccattcatctgttgatgggcattaggttgattctgtatcttggttattgtgagtggtgctgcagtgaatatgggattacagatgtctcatcggtagactgatttcccttctttctgatgtatacgcagcagtgggattggcggatcttatggtagctctgtgtttagttgtttgggagagtccatagtgctttctgtagtggctctaccactttacattcccaccagcagcatccctgccttcccttttctctgcatccccaccagtatctgttcttttttgtccttttgataatagccattctaactgtggtgggatgttactgtgattttcgtttgcatttccttcataattagtggtgatgaacattttttctcctacctgttggccatttgtttgtcatcttttgagaaatgtctattcaggtcttttgcccattttaaaattgttgagtgaagagtttgagaatattttttccaattctgtaggttgtttcttcactttgtttcctttgctgcacagaagcttcttagcttgatataatcccatttgtctgtttttgcttttgttgtctgtgcttttgaggtcttaccccaaaattttgtccagaccataatgccctgtagcataaaacccctgtttaaacaacatgaagagtagtttctcctctttgagctcgtataatactcagattgcaagtccccaagtccaagttaattcttaacttgccccttggtcttctctgttcattttctacaacctgccaatttaccctttagtatttagaattctttctgtggaaagtacagaaaactcattcaaactggcgtgaacaataaaagcgtgtatgatatgactttgtggattcaagtgtattaaattatatggtatgtaaatgaagaaaatgacatttttaaagggtatttaatggttcgtgtgactgaacagtctgaaggtgatagccttgctgacgccaagatctggtttctttctttctcctctgagtcttctgtactctcagtttcatcataaggctcacctcttggttgcagagtgctaacaccatttactcagttgctctggccgggagcttggggccgttcttgactcgcctttccttcacatcccacattcaatctcagccctgtcttcaaagtatatctcaggtccaaccaggaaggaatgcacaaaagatgctcagtagtctttgttgaaattagagaaaaagaaggcaagggaagaattaaagatgaatctcctaaagaagggggaaagaggcttgcctgcttagaattgggaatactggatttttgaaagagttcattgggagcacgtgcacagatgctgaaaggaagaatcaaggtgctgtctgaagaatgacattctttataatatgtgatagagtgcatttatttgatttgttttcatacaacttttaatgtgtatcccaggagaagactgttttcattgttacaaatctgaaaccaataattttcttttaacatgcagatataatataagctcactttttcattactttccctacaaagctgaaagcggttgacttgccttagagattttcctttcattatattctgctgtgacgttgcctttcattaatcccttccagctaagcaaaatttaattagaaccatatcacgtgatggcaaccatttttgtatttaaaaaaaagaattcaaggaagctcagctaccagtcttctcttctaagcaaagtctattatatttagtaggttctttccagaattcagaatatgttacataatggctttttcttcattaattttggataatagggaatttctatgcctgtgttccgttttacatgactgtgacctgaatttaaaatgacatgggacttgagggtgaaaggaaaggaaattattttttaaaggagaaatggaaaatgacccttagcagtgcatatatatatatatatatatatatatatttcccccctcaatgaatatagcaatccgtgttagatgtaaatagggatgaacccattttgcatatagattaagtgaccaaatatctcagtagtttggcaggaaagccaagcctgcagcctgaggggcctcacttccaccatcattattgacaactatgtgctcaagcgagcagggagggtgcaaggaacacgtctccaatccttaaagattatatgagtcctttgctctcaaatctgaattttccctttgtctccactttatgccagcactgattttatttagaattttatagaatggaagcaaattcattctttctttcatcctttcttttctttctttcttttccttccttcctttccctttccctttaattcctttctttccttttttttttctttcttgagacagggtctcactctgtcacccaggctggggtacagtggcgtgatctcagctcactgcaacctccacctcctgagttcaagccgtcctcctgcctcagccacccaagtagctgggattacaggcatgcaacaccacacccagctaatttttgtaattttagtagagacagggtttcaccatgttggccaggctggtctcaaactcttgacctcaagtgatctgcctgtcttggcctcccaaagtgctaggattacaggtgtgagcaaccacacccagcccaaatactctttcttgatgtcataatgaactcaattatgaacacaagtaatcataaaaagtctatataagcaaggttcttactgcctcttcctattcctcttatttataatttcataaatattgctctaggttgataagttaaaaatttttatagtaggttatgtataagatttaccattttaaccattttaaatgtacatgtcagtggcattaagtaccttcccagtgttagacgaccatcactaccatccatttccagaactctttttttttttttttgagatggagttttgctcttgctacccatgctggagtgcaatggcaggatctcagctcactgcaacctccgcctcctgggttcaagcgatttttctgcctcagcctcccaagtagttgggattacaggtgcccaccaccatgcccggctaattttttgtattttttagtagagacggggtttcaccgtgttagccaggatgatctcgatctcctgttttctttttgttttttttgagacggagtcttgctctgtcacccaggctggactggagtgcagtggtgtgatctcagctcactgcaacctctgcctcccagattcaagcaattctcctgcctcagcctcccaggtagctgggattacaggcacaagccactatgccttgctaatttttgtatttttagtagagacgtggttttgccatattggccagggtggttttgaactcctgacctcaagtgatctgcccacctcagactcccaaagtgcagggattacaggtgtgacccaccgctcctggctgtatgaattcttgagccaaacacaggtgactgttatttgttctgtttctgaaatatactttcgacaagtggtgaaaactctccttaatttccatctagtttacttccataagcaagattagcaaggaatatggatcacaagattgggtgttctcagttttaaagccaggcaatgtcaagatttgttatttggccaagtctgtggtctttattatttttttgtcccaccatgtcatttgctcagtgtgatttgtgcatttccagtgtcatccgtcactgctggggagcagacaaatatcacatagaggattagagaaagtgattttgtgcttagaaaataattgaatgaagatttactttgtgactggaagctgcaggatagcatcctgttttaaaacctctcattgggttatataaccagaggtgacccaaagtctttgaagatgaggcaccatctctgagtgagtttttgttggatagcctatgcttgcttgagcaaagacttgtttaagggccaaggggggcccccacgacaatcatcagatggaatcttccatgacacgtctccacttccttccagctgagtggctgttgtctttaagttgccttccttctaccaaggtcaggcagatgtttgttgaaggtttgctatgtaacaggtaccaccttattacctctttactccaatttcctttgcttcatataccatggtgagatgaattcctttagagccccaaattaaaaaaagacaaaaaacaatagctcctgatttttagccaggggaaaccctatgatgtccatctccaggcaaacctaatgcatccttttgttttattgagccagtcttttcctctttcaacaatgctagcaagacttctcaaatgtcttcattagattatcttacaaaatatgcattacccaatttagtttggaacttggacccaaagatcaaggccagccatctctgatttttggaacctctggctgttgctcagttttctggggcagcctttcccaggcacatgctgcatgcagccagcgtcggccaacctccaagctcctctttcctgttcccctcacggtaagtgggggtgttggggaggagagggggcatctacactttttctccttagtcacccaggattgggcacattctgtttcttcttcctttggagatcatccattctgaatttcgaatcttcaagtaggcttagagggctctttatccctcagataacgtgtctatgagtggctgtctggaaacacatggcctttctgtctgcctctcatagggtgaatccagtccttcaaatgggaagctttcgtgtaaggtaggtggggagggggtagttaaggcaggttgggaggaaattattttgggataggtaaagctttttgctgcctctgcaaattgtgctggataatgagggcccgggtcttcttaggataacattcggcatgagtttttttgaggtgtgcaatagaaatacttccagctgtagatacataattgcattgacctgcaaatcatagacagaaagaacaggtacaaaaagcaaactattcttccatgggatttgataagtgtgagttttcttaacagtgttcactgaatgtggagatggttttttttaaaaagagatgaaaggcccaaatgtttgaacgattaagtagggaataggaatgcttattttccaaccaaaacactacatctgtaataaaccgtgatgaggaagtaatgcccctgtaacctttttcctttggtaatttatctttcttattccagtggatgaaagatgactgtgtgcctggggagagagagcagatcagattaatttgtgccatcacagcacggctttattatccgtccttcgagagttttgcaatcaagatgcttttagcagaaacacagtggagaaaggccacttctctcagggcttgtaggagctaagcactgccctttgagtgtctctgtgctgcctgggcagccaagagggctgttttcttcgattcacactcacctcctcctgcccctgactgtgcagggcagacaggtgtggccagcgtgctgggcagccagcaggatccctcacccagggcacctccccctctaaagggatgcttgctttaagagatctccacttgtcacctttctgtggatggttcctgtttggttatctggctctttgtctgctcaatgccaggcatgcattttcttttttaaaatgtatatttttacagtgacatggtatcatgagtacctttaaaatgtgtatttttacaatcacattatattatgattaccttaaaagaaaaccctttaaaaagaattatccatgattctatttccctaatatactgtatcttcatcctctgagttgtatatatgtgtatatgtgtatgtctatgtaggtatatttgtgtgtgtgtgtgtgtgtgtgtgtgtgtatgtctattttgtcatatacccattttcctgttacccatgtaaaaaatcttggcatcagctctttaccctttctgctctggaaatcctgccagtgcatatgacatgatgaaaggacggggggctgtggtgtccagcaactcttagcatgaatcctgattccatcacatggtgactcagccttgggaaagaccatcctttgtttgttggttcattcatctatccatctgtctgtcctccctgcctcccttcctgtctcccgttcacaagcattcactgtacagcatgctagatttgggggatctgggcagcattttcccatccataaaatatagatattgcagcatattaaggagcattgttaggaggattcaatttgctaataatgcatgtgaagggacccagtacaacaacagcaacagcctggcacgtgataagatgctcagtaaatggtgctgtgtggtcagtcagcaagtctcatcgttcttgtgtaatttccctggcctctgttacttccatttcttagcagcctgcatgatgatggccaattactttcatacctagactatgcaagaggcttctaatgaggcattataggcctcaatctattctattaaattcttcctattaccaccatttgcacttctaaagcattgtttttgtctgtgttactctttgttcagaacctttcagtgatttcctaggctattctgaatttcttactggccactcacagccctctcagtactctgggctcctcttgggatttcagctctgagccatcctgccaccctcttccacctacggaaatgactcaccctctttggtcttctgtatctactgccatatgtgcagggaactgtattatcattggtgagaggagaaaatagcgtatgagccacacatttgggaaactctaaccttccttgtgcagagtcttagttcatttttgctgctataacagaatacctgagactaggtaatttgtaaagaacataaatttgttttcttacagttctagaggccaggaagtcgaagatcaaggtgccagcattgagcaagggcctgtttactgcatgctcccagggggaggaagaccttgtcctcgtgtggcagaaggcagaagggcaaagagacaaaagggggctctactcacctttttgtaatgacattaattctacccctgagggcaaagccctcatggtggagtgaccccccaagggtcccatctcccaaaactgccaccatggcaaccaaatttcaacatgggtttcacagctgacatgaaatcaaaccacagcatgcagtaaagacttatgactaacctagtattcctgagggtatactgttttttaacatgttgttattattcaacaaatgataagagtagtagatgatgcctttttggagctagacttcaagctttcaaggagagactaggtcatttattttttgcgtcctctatcttattaccatcaatacaaacctttcagggggacatgtgcagtagctcaacgcctacaatcccagcactttgggaagccaaggtggacagattgcttgagcttaggagttcgagactagcctggccaacatggtgaaaccgtgtctctacaaaaatgtaaaaatgagcagggtgtggtggcacttgcctgtattcccagctacttgggagtctgaggcaggaggatttcttgaacccaggaggttgaggctgcagtgagccaagatcaccccactgcactccagcctcggtgacaaagtgagacccggtctcaaaaaaaaaaaaaaaactcttaggggattactttctataacagttattttgttgattcatccttaggactatttatcaaaaccatgttaagctttgaaaatatttactgggtagtagattttgctgaatttgcaggaactctcccaactggtgacagaatctgtagcaaaaagacagatataggaaggtgttaaggtgtttgctaagattgttttgattcatttcaaaggtctgttttctgtagattgcatttgtgtctgaatgagtttattaagttgctgaggaagtcctgcaacccacatttagggatactcacattatttataatcagttattctctttatattttatttcaaccacggaatacaatgtttatatacatttatatgtgtgtgttagtgtgttgctataggatggtgcaaagtattttattttattttattttattttattttattttattttattttattttttgagacggagtttcactcttgttgcccagtctggagtgcagtggcatggatcttggctcactgcaacctccacctcccacgttcaagcgattatcctgcctcaacctcctgagtagctgggattacaggcgcccatcactatggccagctaatttgtgtatgtgtgtgtgtgtgtatttttagtagagatggggttttaccatgttggccaggctgctcttgaactcctgacatcaagtgatctacctgcctcggcctcccaaagtgcttggattacaggcatgaaccgctgtgcccggctaggatggtgcaaaatgttctaaattttgtttcccggtttctactttgggaaactgtcttacaatctgattctcctctccctcaacttcagagagtaagagccacagtttgtggccctgtcagtgctggcattttgggactctgttatctatgagtctaatcaataccaaatgttgctgattctagaatgaaatgccttctgattgctgtttataagattctgtctgtagtgaaattaaattgacttctaacagcaagtatctctgtttggaaaataaagctcgtatgttaaatcatgtctattctaattttagtttcctttttctctaccagtttgctgttttgtggtccacaagaggtgccatgaatttgttactttttcttgtccgggtgcggataagggacccgacactgatgtaagtagtcctgaaatcatgatttgatgtcaatgtggatttctgagctttaatttttttaacgcctgtgcaactgttagttttggcacttactgttaatgggaagactcaattctcatagagcgttggcttgtagtaatgagcagatttatagcccatatgagctctggactacatcttagagaatttctcagaggagaatttcttggtagcatgtactgttccactttgggcagctgcattgactaaatccaccaaatttattgtaatagctttcacaaacacaatgcagttgttgacagattttacaatgaacatttatcacccttcagtttatttccgttccctcccctcccctccccacccctcccgtcctcttcgatggagtctcactctgttgcccaggctggagtgcagtggcacgatctcagctcactgcaacctccgccttccaggttcaagcgattttcctgcctcagcctcctgagtagctggcactatagatgtgcaccaccacgcacagctaatttttgtatttttagtagagatggggtttcatcatgttggcaggctgttcttgaactcctgacctcaagcaatccactcgtcttggcctcccaaagtgctgggattacaggtgtgagccactgggccctgccacccttcagtttacttctaagctgaaataaaccaataggagcatcattgctttgggccaatgtaacaaactgctcctggtttactccaggggattcttgctgccttttcggtgtatgttaaaaatgctgctgctgattgaaataatttagcatctgtttcactgaacagtgatctctgaagttgcccatgtgtgaacacataatttcctctctttgtggacaattctgatggtctctgttgcatctcttgtgtacttaaaaatgggatccacaggccgggcacggtggctcacgcctgtaatcccagcactttggaaggctgaggcgggcggatcacctgaggtcgagagttcaagaccagcctgaccaacatggagaaaccctgtctctactaaaaatacaaaattagctgggcgtggtggcgcatcctgagatcctagctcctcaggaggctaaggcaggagactcatttgaacccgcgaggcagaggttgtggtgagctgatatcgcaccactgcactccaacctgggcaacaagagcaaaactccgtctcaaaaaaaaaaaaaggatccacaaaggagtcacggaaaataccaatgtctaaaatatgttggatagagagaaacttcagctgttatatgaaaagtaatattttaactgaataaaaaaaattgtcaggcaggcttagaagggtagacatttctgttctgaattgcttttgcttgatcagtttagtcactcaaattgtgtgcttgaagcgattcccatctttaatgcctgttcccatcaggaaactttaatttgaaagtggctatctcagtgcaggcaagactaaattcttccctttgcgaaagatgacatttttgcagtgtgctctgagggattccgatttgcgttgttgtaacacaagtaagaaggaagttactgtttggtgttcagtgcacgggaacatgcacaatggggttagggtgcttgtggaggcaagatagagtgcctgttgtgggctctgagcccacatacacatacacacgggttccacaaaggctcacaggacatgggagccagaggaagctcaggcgtcaccttgttttataacttcatggacaaggaagcccaagtccatgaacgttgagtgacttgcctgcatacaaacaaaactagttagtgtcattcccctgccctcccccctgctccccgcctcctgccccctgccccggccactttccatacttctcttctggcatattctggaatattgtcttcctttggggcattttagagataaaaatagctggaacgtaaagtactaacttttccaaaaagccaagtcccattgcacttgtttggagttgtctaaaacctcatgtcatagcctttcacttccttgctcatcattcccatctttatcttgctgtatttttctttcctctcttctcttctctctcctcccatttctgccccatcaagaatgggaagggaggatgggcaggcttcaggatgtgagtagtttgtctgactcccttctcttcctttttcttccccctcctactttttcattcttttggttgagtattctttattgagaacccataatgggccaaagtctgtgcttagtcctggggtataacactaagtacagagatatgctccttgccttcctggacattctgctgtgggaaggcagacattaaaatatcactaattcaaataggatacaggtacactgagcaggtttctctaagggacatactgcatttaaactgagcttgacgaatgggtaggagataggcagacaaaaggaagggtgtgtgtgtgcgtgcgtacgcgcatgtgtgcacacatgcatgctgggctgtatggggccctggaaaaggctgtttcagacaaagggaagagcaagtgagaatgccaagatatgggaaggagtttaatcaataacaaacagaaagctgggagttgggtgtctggcaaggattttgggcacaggcttaggagcattgggggcccaggaaagagtttaaccttaagggctcatctcttaatacagtcacattggcggttaagtttcagcatatgaattttcaggacatggaccattagcagacacattcagtgtgagatgcctgacgctgggagtcagttgagtatggaggcaggtgtggcagtcagaagtggggtatgtcctaaagataaagattcctatgattttttttttaatgccttggatgtggatcatttttgcctagggagagggtatagagtggggagagaagggattaggtctcaggagagagctctaaggaactccaacatgttgcatgggagaggaagatcagggtagggaaaccaagaaggggcagccagaaaagtaggaagaaaaccaggggagtgtgatgctgattgaatgatttcctaaggggctataggccaatactgtgatcgtatctctgtgtttgttatgaattctctacgttgctgaaactgcgtataagtaggtaacatacagtttgtaaaggacaatcttatttacatgggaaagtctttgtttatgcccaccatggatcaattgatgcctgttaattatttttggtaactcatttcatgctcagattttttatcttgtttggctgatcattatggggtcatcctactcatagggcctggagccaggtaaaaagctttagaaaagatatgcttggtgcgaaatataacggaaacacacccgtgagctgatgcccagccatgtcctgctcctaatcttgtgttgactttctgtagatgctgagtcttacacttaaaatatccttgaaagtaatgatgattagatgaattttttttaatgtgaaagagaaagaggtatattagatattcaatgcagtcctgcctgcctggttcacaaaagatcatgcattcacccaaaagatcatgcattcacacctgcatccatactcaactgactcccagtgtcagacctctcatgccgaatgtgtctgctaatggtccatgtccccgaaaattcatatgctgaaacttaactgccaacgtgattgtattaagaggtgggccctttaggaggtgattcagccatgaggtggagccttcctgaatgggaccagctcccttattagagaggtacaagggagctgttacctccatttccccttttagcccttctgtcatgtgagtacacagcaaaaaggcaccatccaggaagcagagcccagctggtgccagatacagaatctgctggcaccttgatcttggaagagaaaggagaaaatttgatttttggtctttggagcaagagacctatgactagggctttctgcagccaaggcctgagaagtgttgactggctgtatgcaggatgattttacttactgtgcaaatctgcaagcaaatcttatgaaggtacaaggtggccaaactgtgctgcaccagggagatagttggaaaatcatgaaggcattgggaggtagaactgagctgagatgctagaattttcttattttatccttttctgaataccatttttctgcaaatcccagaagtattgagccagaaggggtgttaaggatttatctgggttaaccttactttgtggatgaggagacaactaaggcaaaaatgatctggggtactgtcatatgttatctcttgagtatccagtgggcttgtggttgattctttcaaggcaattggccatgaagagaaacaagatgttggtggcttgactggattgtgctgccagtggagcacattgacagctattccttggtgcatttgttgaaaattctggtcaggtgtttggaaaactagcagacttattttaccatcttgagaattaacttatcctccagtccttttcagtgtcttagaaatcaatccaataaaaaatgcctgctggcaggctcagtgaggaagaccagtgaaaagaatgggaagtatcagaatttaagagaaaaaaaactgccctaagcatttttcccctgaaaaatttaaaaattttaaattaggattttttttttcataccatggagaatggttaagatgtcctgttcatgtgctgcttaatagtaccttcgttgagcttggcagactctaacacattcacagacggggaaaaagaaggtacaatccttgtgaaatcctcaaatattgtacctgctctgccatcttcaagatgaaaggatgggaaaagtactgagaaataaaatagcggtacccaggttacagtagccagatgggaagacattacaaagttcttttgaacagagatgctcttcaagactcaaggagcagtcgtagttgagagtatgcattagtgcagggaatcttggcagagaaaaggctcctgggttcacagaaggaccctccctggagatcctcaggccaatttctcaagggtcctctgccccttctggatgagatggcattctgtaccagcaaatctagagcaaaaagctgagcaattcctagactttaagtccgtccccatacacgctgagtagagaaggaatgaaagcagaagacttaagagaaccaacgttagcggtgagctcattccctggtactgcctgtgtttgcacccggggctcaggcttggatgctgaagtatgtggctcatggaatgagcagcagctgtcttcttacctggtgttgggaaggcactttgagttggtgcaggatttatgtttccaggtgtgtggccctagaatgcagcttggggctctgcccagtaccccattccagcatccgaggtttcatcagacaacataaaataagacaaaagtgctctgtgtttagaaatggcttctcccccttctccaccaaattaagatgcagactcggacatgggcaggtagaagtcgagagtagagccgtggtttttggggcagtgggagtagtgagcctggctttgctctgctgaagggcagcaagtgcccatgcttctttggctgccattgattgcctgcctccgtgggctgctctggccatgatggggtggggcagattcaggaagggctagtggtgtggggtctgcagggctggctctttccagacttcttcctctcacttcttaaaaccttagctcaccagtgtcttcttgatcagtgcggagctccctgttcttagaagagtttctattcattttcgattatgtctgttcatgaagcccaccctgctatgaagaggaagaatggggtctgggggcttcccattatgcatctgtgcatggatgtattgatatgtatttgtgtgtgtatgtttattagcacattaagccctttttaattttttttttttcttgagacagagtctcgctctgtttcccaggctggagtgcagtggcgcgatcttggctcactgcagcctccacctcccggattcaagcgattctcttgtctcagtctcctgagtagctgggactacgggcatgcaccaccacactcggctaatttttgtatttttagtagagacggagtttcaccgtgttggccaggctggtctcgaactcctgaccttaggtgatccactcacctaggcctcccaaagtgctgggattacaggtgtgagccactgtgtctggccctttttaaaattcattttctctgtgtgtcttaagtgagaaagctacaaagcagcactttgacagaataataccaagctcagtcctgctcttagggccacaatgtacaactccccctgccctgcagctttctttttttttgagacgagtctcgctctgttgcccaggttggagtgcagtggtgcgatctcggctcactgcaagctccgcctcctgggttcacgccattctcctgccttagcctcccaagtagctgggattacagttgcattccaccacgcctggctaatttttttttttgtatttttagtagagacagggtttcaccatgttagccaggatggcctcgatctctggacctcgtgatccgcctgccttggcctcccaaagtgctgggattacaggcatgagccaccgcgcccagcgtgccccccagctttctcgtcaaaagttgtaagaagagaagctgtttttatgtgtcatccataaaataacacacatgctaagcaactgtttacacataatctttagagtgtttactctgtgcattggatatgtggacatttgagaaagtaaggggtggtgggggagagagtgggagagggatttgttaaaaggcttcaagcgtctggaggtagtaagctttcctcgcgtttttgttgagccattatgtttttatttgccccatgtgtttttaccagtgactctggcttctctggggagaaacttttcccacagtattttgcacgttttatgtttgaaccgtcccgttgaacagaattcaggtgacttcgcaggttattgctctatctcacctggcagacaaccaacatgtataccggtgacgtcacaggttcactgaagcctgccagaatgtttggaaggggaccaaatgaatacattaattaacttgttaaaagatagggaggcttgcttcagacctgggtacaccttcaagtcagtgaagatcataaaactgatctatttgaagaagctgagcgcactgactgtaaacatttaaagctaaaaacggaacctattgcacaaattgctacaaaccaaaagtgatatcccctgtgagactggactccgtggaggactatatgtctagaaagcaaaattgctttcttttctttactacaatcttgagaattctctctttctccagtccttttcagtgtcttagaaaccgatcagataaaaaaggctgctgaaatgttgaaaattcagcatttcaaagattcatttataataaaatttaaagcatttaaaataaacctagaaataaatttaacagtgaatcttctgttttttcgaagtgtacttttaaacattgaatttagaaaaagatgattttgtgagcaaagccagttctacccccaaaacatttttatattcctgaactgacacggtaaagttagatttgcatgaggtacagaagctaaaaagttgcatttaaaattcagcagagtatatcgtgcagagagtcctggagtgggaattgggagtcctgccaggccacattactgaagccctttctagacctttgttttcttacgtataaatatggaggttgaatttagagatctttaaagttgccttcagccccaagtttcattatagtccctctgttattaaacattgattgatagccctgtactgtgaaggttacaaaggtaaagagagttcctgccctcccaaggcagggattatcctctaattgcaagggtaaaccaattaggcaaagagttgtactataagattgcacagggtgggccactagcagtggcccacgcctgtaatcccagcactttgggaggccgaggcaggtggatcacctgaggtcaggagctcaagaccagccaggctgaccaacatggtgaaaccccatctctactaaaaatacaaaattatctggacgtggtggcacacacctgtaatcccagctacttgggagactgaggcaggagaattgcctgaacctgggaggcagaggttgcagtgagccaagattgcaccattgcactccagcctgggcaacaagagtgaaactctgcctcaaaaaagaaaaaaaaaaaaagattgcacagggtaggtgccataagtggggaagaaataaaatgctgctgagtttagcagggagagagccagcctgcatctaatgggagaatgcaggaagagcttcataaagatggtgacatttcaagatgtatttcaattcttttcatcattttcctttgaaaataagtccatcagtgtttttctgttgctcatgttggcccatgggagttatgtctcttgcctaatgctgccatccagcagtgcctacactcaggtgacatatttgccagtggacctgtcataagagtgcaaggagggaagcctgtaatgttctgcatgtcctgtcgggacccccctcccatgagcctctgaggaagcccgagtccatttctgaaaccaccctcggcacttgcccgcagatacccttcttcacttgctgtgatgccacaggaaaccttaaaaagaagttatttcggggaaacacacccaacaaaaaaactccagtgctaattctgctcttcagtgggtggattattttatgtaccagattcacagtaacagaagtatttcctacaagggaagggactcctgctgcacttggaccaaattaatttagccgggagttaaaaatagcctccgagacttctatcctcatccgtagttctgatgagcaaaaggagacagtgggggagtgggtggcatggccattctcttgacccaccaacctctggccacagggaagagggagggatgagtatttgccccgttgtctgcacctgattagctgggaaaaaatgcgcgacgtaattacaaagaaaatgctcccattttcaccagtgtttggaaggcatgttttcaagggagtcacctgggggcttgtcagctgaatccctaggttgtagttcctacctcccatctttggaactccacttttgaatggcctggacgggcagtagtacatccttttcaaaatccttacccttgccgagttgtcagcctctgagagggtggtgagattgtctcgggaggcagacaacaggccagtggaacccagtcagaataagggagccttttgaggtgggtagaattgtttttggtcaaaaaagaggtgagatgatcaattagagtgattttgttgtgaaacttataaaatgcctctgacatcaagtctgggaacagatctttgtgtattaaccatagagagtgtgtttgaatcattgtataatgtctccggggcacttttatttaatatgcttatttatttatttacttatttgaattttagaggtgagacttgctatgttgcccaggctggacttgaactcctggacataagtgatcctcctgcgtagctggggagacaggcgtgagcagcttcacctggggcatgtttggttttttaaaaattatttacttggaggccaggcgctgtggctcatgcctataatcccagcactttgggaggtcaaggcaggtggatcacctgaggtcaggggtttgagaccagcctggccaacatggtgaaactccatctctactaaaattacaaaatttagccaggcatggtggtgtgtgcctgttctcccggttacttgggaggctgaggcaggagaattgctcaaaccctggaggcggaggttgcagtgagccgacatcgtgccactgcattgcagtctgggcgacacggtgagaccccgtctaaaaaaaaaaaaaattatttacttgggatctggcctaggcaacatagcgagaccctatttcttaaattaaaaaaaaaggtcatattacttaatgatcatatttacacagtgaattctttgtgagagggtcctgtgtgttttctctttgaaagccgagtgcctgatacagggcctggcacaaattagatactcaaaaagtattcgttgaaccaaagagaatgagttggtgaaggtctgataacctaacttgatcaccagtcgtatttatccggtcttgaattacttgaatatttacagctgtgcgtgagacttttactgaactcccttaatacccaagagtagccgtctcatcagcatcattattacggctgatgctgggggtgtgggggaacacacctgatgggcttttctgtttttcccagtaactgtttcaaagtgtagtcttcactatttggaatttagtttaagaagtagtgggtgaggcaatagcttttgactggttgggatcaacaattggtatgatggattccttgtttattttttctgaccgatccaagtgactcagtgatactagacatttcgtgatgtacaaacagccaaattacctgaccctgagaactgttgttggaaatggtgtctggagagcctgctgtaggagtgcaaattctcggaagcccagagttggaagatccacggcacaggatgtgacatctttgtgataccatgtatttagcgtctcttatgtgtctggtgtttttcttgcatttattcattgtatgtaaacattaaatgtttcttgagcatttattgtgtgtgaggtattatgggaggcaaaggttaaaaaacacagttcttgtcttcaaacaacttatccttagtgggaagtcatgtatatgaataaatattactattcaaatagtcacttcagcggataacatacataaatgcactaggtatgcattattgttcccattgtacagatgtgcaaattgaggcttgaggtagttaagtgattctcccgagtgcagtagtaagtggagcactaagctttgaactggacctctcaacttccaaacctgttctttttccacagtaccacgtgactgaacagcaaagctaacttaggggcagttttctgtcagtgaaggttccatttttgtgggtggagtctggggtcattgtgactatgagaaatcttaaaatggtaaaagaaatttggaatcatacaatcctgagacattaacagtaaaaaccttcacaaggcagattagcaacgtgaactagtaaagacaggagcatgtagggctgatgggaccgggtgggagctggcagcagtttggagacttggtttaggtccttctgaagagggtacagagtgggacttttcaggacattgggtttctggaaagatccgtttcaagtgtctacaccctaagctgaaagccagcccagagagctttttggctcatgctggggcttattcctggattctgatgagtcatgttttttagaagctgaacttctaaacttctaagccgagtcccattcagttagctggtaccttcctcaccttggctttgttttctgtttttgctgcttaatacatttccagcaggagatttaggaagggtctgtggacagagaagtagatttcccaggatctaagaaaagaaggttggtttactgtgggtattctagctgtcattataactgtgttattttatttatttacaaagggatcatgagccagaaccaatcataacaatcaaatgaacccactcactgtttcagcctctgatggtggctaagagaaaacagcaagtggggagcaccccccctcacagtcgcctctattatgttgtaccagaagctgggatccagcaccctcaaacgtagaggcttgtactagcaagagtcacatggacagtgggaaggtccattctaattattttgttagtaattcagtctgttctatttattcttataatctagcacattccaaaacatatttgttttgagaatgataaaccaaggggaaaagtcaggttttaagaagaatgtcatggccacgaagataacactgccgttgggcgttgccgtggttctgactgggtgaaggtttcccagtgaccatctttgtgtggaaagagcactctgctcctgatgttggggatgtcatgccacccacgtacatcactgtcctcagcattccagcactcttgcctattctccgtgcatctcttccaccctgcaagccattgcttatgtcaccctgattgatcatggtgtaacacccagctgtcctctgcacacaggatcccaagccagaagtctcaggattttcttggttgtctccatcttttttttgtttcacgcacctaataggtttccaagtgctacgagttctgctttcaactctctttcctctccatctccatagccactgtctttgtgaaggccttgttgtgtgctgtgagttggtcttactgactctggactgtttctcctctatgaactgtctttcatattgccaccccgtggtactccagttgttgttgtttttgttttttaatgtgattatgcactctcttgcttatcatcttccaaggttggtacagagtcactcacagcggcctcactggctgttagctgtggctgctggccagggagtcctaaggtctgccccacattagcttgggagggtagtgcaggttttttacaagggagtggcagttttccaagaaggaacacctcagtgtacacacacttaataggcttcccctggcgctgtgtttcccagtgtttcattggccaaagcccagagtcactgtgaaggtttatgaatcagggttctccagagaaaaggaacgtgtgtgtgtgtgtatgtgtgtgtgtgtgtgtgtgtgtgtgtgtgtaaagagatttaatataagatgttgactcaatgcaattatggaggccggcaagtcccaagatttgcagggtgagctggcaagttggagacccaggagagccaatgggatagcaccagtctgattctgaaggtctgggagccaggagagctgatgatgtaagttccagtccaagctcaaaggcaggcaagcttaagacatcagctctgaagtaagagctgatgttttagattgagtccaagagcaagaaaaagctggtgaccaaatctcaaggccttcaggcaagaagaatcctctcttacttggagggagaggcagtctttttgttccattcaggccttcaacagattggatgagatccacctgcactaggaaggacagtctgctttgctcaacctcccgatctaaatgttagtatcatacaaaaacaccattgtgtaaacacccagaataacgtatgaccaaatgtctgggcacctggggcccagtcaagtcggcacataaaattaactatcacagaagggtgtggaacctgggggtatgagtcactggggccgttagtgtaaccatttgccacaggcagacttgtttgggttataattctttcctgtaaatcttattcatctctgtatccccaatgcctagtatgatctctgacttatagtaggtgatcattaatgtttgttgaaagagcgaatgaatggaaaaaaaaaatgaagtctttgattccctaaagaaaatgaaaataatttcatagacttgagtcaagcttgtccaacccaccttattttgttgtcgtggtggttctgttttgttttgtttgagacttttggcaacctgaagccatgttttttagtttctatctctagtgataagcagaaaagagggatgaggaaggggctttactggcccaacaagaaacagaaactaagaacccatgactgtattctctcccttggacactcctaggagtggaatatctgtgaaatgtttcctgcgattctctcagaatcaataccagccacttcctgattacaagttaccatctttagaaagagaattttgttttcggggggaaaaggttttttgtgttgagggactcttcagtgcttgaagtttaagcctaacgaaattatgcaagatgcccactgaactgtgcctgctgtgtgaccagaatctcttaacctcatgagcattttttggttaaatgttggtaggaaaaactgcttattgaaaggcaaaacttgttttgtcacctgcgtattttagggtgatcatccttgaagtgatggcttatcatgtagagaggtttgtaaccaattgcaattcaaaagggagaaatggagagagctaacagcttaaggaatcaatagcctttgatttctttcccatttgatcactgcctttctgggtatattcctgactttacatagcctgcctttgccaggacagagactgtcttcagaaatcttagagtttactattcttgttcatgagaaattgttatgagattgctgtaggaaagtatgtattttactaattttattatttttttttgagatggggtctcactctgtcgcccaagctggagtgcagtggcccaatcatggctcactgcaacatcaacctccctgggctcaggtaattctcctacctcagcttccctagtagctgggactacaggcgtgcaccaccatgcccggctaattttcgtgttttttgtagagacgggattttgccttgttgcccaggctggtctcgaactccggtactccggtgatctgcccacccctgctccccaaataacgtattttaaaacatacagattataactgctttacaataggtgaggcattttttttcgtgtcataaaacatgcctgtgatgaatgcctttaggaaagcagtacgcctattgctagctttctgcacttccaagtcccaagcctattcctcctcatccctttttcaaggcaggaagctttgtagaatgagcatgggatatcagtgtttaaaacataagaatttcatactcgaaaatgatcttctctgtggaggtgggtgattttaggtttctagatattaagcttgtattatgactcatttgttcttaaacaggttgttctccagttactaaaattaatcacaaaagaccaaggaagcttgaaaaagaaggggagttcatacagcaggtcttaaaattagaaaggcagggctgctctcttttgcatttgctaagtttgaatgatgcaccaggatttaggtaattcatcgtaatcgttgttttttccccattaagaattggtaactgggaataacttaatgtgtaaaactagacggggaagaaaaatggtaggctgaatatttaagaaggaatcacattcctaggtattaaaggggcttgggcttgcggatttgctgctcgctgtcagtttggacacgtgtgctcaaatcaggtcattctctcatatagtgaactttttttttttttttgagatggagtctcgctctgtcacccaggctggagtgcagtggtgtgatcttggctcactgcaacctctgcctcccaggctcaagaaattctcctgcctcagcctcctgagtagctgggattacaggtgcacaccaccacactcggcttatttttgtatttttagtggagacagggtttcaccatattggccagggtggtcttgaactcctgatctcgggtgttctacccccctcagccttccaaagtgctgggattacaggcatgagctactgtacccagctgtcagatagtgaacttctgtccatccggcagccagacaatgagagagtccagcacagtagcgcctctgaagaaatacactgcttgccaaatagcttcctagcttggctcctggtttccattcccatcccctacagtttaccctccacagtagctagtctgatgttttgcaagtgttaatatcaggcagatcaaatcattgtgtcactccatctgaacccttcagtgccctcctcttaaccactggaataaaaaatatgtatacccagcctggccaacatggtgaaaccccgtctctactaaaaatataaaaattaactgggcttgttggcagccacctgtaatctcagctactcaggtggctgaggcaggagaattgcttgaacctgggaggcggatgttgcagtgagccaagatcacaccactgcactcagccttgatgacagagtgagaccctgtctccaacaacaacaaaaaaagtgtgtgtgtgtgtgtgtgtgtgtgtgtgtgtatttctttctttccttggtccacaaggcccatcatgattgtgatctggctcctgcacacctcactgaccagaacatcccaagctcattggcaccccagggctgctgccctgggcggttcctctttgtagaactaatcttcatgatgctcattcgtacgatttcagactccgctgaaatactgcctccttcgagagcctttttagatcataccccccttgttattattatttttgagctggcccaggctggagtgcagtgtcatgaacttggctcactgcaacttccacctcccaggttcgagcaattctcctgcctcagcctcttgagtggctgggattataggcgtgcaccaccatgcccggctaatttttgtatttttagtacagacagggtttcaccatgttggccaggctgatctagaactcctggcctcagttgacctgcctgcctctgcctcccaaagttctgggattgcaggcgtgagccgccgcacctggtccccctcattattttctattactttatgcacttcaaaccccctgtcatcatctaaaaccatacaatttatttgttacttgattattgggtatctttccaccaacttgaaagcaccgtgagagcaggatgttatcttactcttctgtttaacctaaaatggtgcctgatgtgtggtaggtgctcagtgaatatttgttggctggatgagtgaatgcattttagttgcacaagggagatgaaagatcttatagggttttttgtttccttctaacaataaaactaaagggaaatgtcctaagatcaatagagactttttcctttctatgactgtgatgccatgccagtgaagcctgagacctgccgtgtgatcggacatcttccaaataaaaggtgtgttcttcttaatcttaatgtttagaatatgcagcctataaaattaattttaaaataaaatgcatacagtcaatcttatttaactagaatacttaaccacttgattctgaatgttgcccattctggataagtgaagtagatgttgaatttaaaaccttgagaataatttgtatctaataggatcctaaccttgaatattatggctgcatatcgacttgggatcagtgtcctctcttagattgtcctctgcagtcattaatttttttctgctaatattcttggtgagcagtagggtgttgttaagtaaattgatgcatcagtgtgataaaatacatgcagccattaagaatgatgcttataaagacatagaaaaatgcttatatgatgctaggtgcaaaagcttaatataaagttattgccatgattgtcactacagcagagttagtgtaggggaacaggaagtagaagggaacctaaaagatggaaatcatttaattgatttttaaggtgatttgacatagggagattttctttttggatttaatcttgttagaacaatacaattttcaacagttataaaattctgtttacagtagtccccacttatgtgtggtttcagttacttttagtatagtacactaagatattttgagagaccacattcacataacttttattacatacagtatattagtataattgttctattttacaattagttattgttattaatctcttactgtgcctgatttataaattaatctttaacatgggtatgtacatataggaaaaacatagtatatatagggtttggtactagccacggtttcaggcatttactggggtttcttgggatgtaggccctacagataaaagggcgactgtacttgtacctttctctagtctaagccatgtaattctcttgaaatatgacagagcactgtcacctcccagaatgctacatgaatgaaacatacccacccatctgagaactctccttcgcccaacagtgtgatgagaaagttgtctgttgcagatatctacactgctgcatgctaagtgtgtcatcctgggattcaaacgtgagtaatagaaaacctgactaagcagcgacttgaactgaataggaggctcgctctcctcatttaacaaaatgtccagaacagggcagtccaaagctgatacagcagctccatgtttctgtgcgggacccggcctcctccagcgtttagtttagctgtcttgtcttgtaggcttctttctttcattctcatctttgttacccggtaggtgtgagatgcctgcttcattagcatcctacccgtgctccaagcaggaggtgagccaaaggtgaactcaaatcacagatgcttgttaaggccgttcccattcaaagaactcctccagaaacaattccattccagcagtttccatttacatcatcttggccagaaccatatcatgtagccactccgatttggaaaatgttaggtttctggtttatctggatggttttgtttgcttgcttttgttgagcatgtttctacctggaacaaagttaacttagttttgtgataaagaagggatgtggccgggtgcggtggctcacatgcataatcccagcactttgggaggccgaggcgagtggatcactaggtcaggagatcaagaccatcctggctaacatggtgaaaccccatctctactaaaaatgcaaaaaaattagctgggcatggtggcctgcgcctctagtcccagctactcgggaggctgaagcaggagaatcacttgaacctgggaggcggaggttgcagtgagccgaggttgcagtgagccaagattgcgccgctgcactccagcctaggtgacagagcaagactctgtctcaaaaaaaaaaaaaaaaaagaagggaatgaatgttggataggtaactaacagtgaactctgtcgtaaagttgctgaggattgccttaccatgtgtgcacacgtgtgtgtaagtcttttcaatgctcctattgctgtgacttcatctctagtacaggaaggattctgtcacatgacgtcatgacaggttttgagatacagtggaattaactgagtttcttgatctgctgatgacagaaaaaggagacaaggatgaggaagtcttgtgtgagtttttctttttttgcggggggtagggtgtctcactccttttgcccaggcttgagtgcagtggggtggtcacagctcactgcagcctcaattctctgggctcaggtgatcctccccccatcagtctcccaagtagctgggactgcaggagtgcatcaccatacccagctaattttttatatttttagtagagatggggcctcgctatgttgccctggctggtcttgaactcctgggctgaagcaatccgcccacctcggctttgcagagtgttgggattacaggtgtgagtcaccatgcccagcaatgagtttttgtttttgttttttgtttttcttaaacaaggcttttcttttatctttaaacactttgttggttctctctgtttggtagttgtactatgtctaagttgtttattttgttaggagcattttgttgtaatcatgaaatattttgagattcaatacttgtgtttattcagtcataatattcttattatataatacttcctgatagtagatattaggattgattgaagcaaagcatgtgtattaataaactcagtattcattaaagcagcttgggttgcctgtagaaacggcagagcatccccaaggctgagggaggcggggctcctctgtgggtagcagacttcatctgcaggacaatgtgcagcacaggctgcgggtattaaaggagggatcaagaaactggtattaccaggggcacttgggaggataggggatcaggtaagccatagcatagagacccagaaaatgagccaggaatgttcagtgtgaaaaaaagaataaggctgggcgtggtggctcacccctgcaatcccagcactttggaaagccgaggcgggtgaatcacttgaggtcaggggttcgagacgagcctggccagcatggtgagaccccgtctctactaaaaatacaaaaattagccaggcgtgatggtgggtgcctgtaatcccagctacttgggaggttgaggctgcagaatcacttgaacctgggaggcagaggttgcagtgagctgagatcataccactgcactccagcctgggcaacagagcaagactctgtctaaaaaaaaaaagaataagttgcaggacttgatatgagagctgcctttctaggaagaagggtggactcaccttgggaactccatgtgctgacccagaccactgacaaggcgttatcaggggacagcattttatacaaccctgagaacaacctccagtgagtagatgtttccagcaacagaacaaggactgcagaacagggaggctgaggtggcttaacaagaaatgctagctctgatctgggccgaagcagcagtgatggttcccctaggccggaatttgatgcgaggctaggatggatattgggttttctctctggaatagctcagctcctcctgtgccacctggctaatttgtactctttcttcaagaatcggaattggccggtggttcacgcctgtaatcccagcactttgggaagccgaggcgggcggatcacgaggtcaagaaatcgagaccatcctggccaacatggtgaaaccctgtctctgctaaaaatacaaaaattagctgggcgtggtggtgcgcacctgtagtcccagctacttgggaggctgaggcaggagaatcacttgaacctgggaggtagaggttgcagtgagctgagattgggccactacactccagcctggcgacagagtgagagtccatctcaaaaaataaaaaattttcagaattagtatctcaggagattttcctgactactccctgtcccccaatggactcctttcttcccctcctcgcccccaattcagttgtttctcttccacctcctgcgtgcctctttgaagactttcataccacttgttgtaattgttcctctgtgtctgcccatgcactgtggcccttgagggcaaaacctatctttcatctccccgtccctgtcctcagtgcttacacagaatctggcatgtatctggctctcaacaaatatttattgaattagcaagtaaatgaatagagatcagattctgcttgagttaaccttgacgttagacagaatttctgttctaacttttttcacgccaaaaccattcttacaggtttttctgagccaatctgttgtggcctcttagcataatggatagttactgagaaaaaagaattaacaccaagttcttggcgcaagtgccatccagttgaggtgtgcaacttccatgcttgtgacaaggttgaaaattactcatcaagctgtttttgcaaagcagtttctgcttatcagtttacgcatgaaaagtccactctgtgtctgtgttgatgaccataacgtggaccatctaacagctaggatatttaggatggttgtgagtacggctgcaggttcccttttgcttattgaaatagaataaccagagaagaacaaggcaagttttaaaaataacttggtacacatgtaggtgaaataaccttacctcccagtagctgagagaaaaaaaaaagatctcaatgctggctgttgttccaggatatttttagtaagatggccctgtcgtctttgatggtcaatgaaggaataatggcagaaaaaaatattaggcgaggagaaggctacgggcattgtttggtgtttcatttaatttccacctcatccaccagagaaaagcaaacataagcagaggttgatgatgagcacagtagaaaggaaaatgtgatgtgtcttttccttgtagttggttgataatatgtgatttgcttataccacattctgatgggaggtattttcagtctgtggctttgtaagttgaagggcctcctaagaaactcctgtttcgtaagatattctctgtcttaacttttttcaggaaaaaatatgattttttggagttgcttaatagtttttagcttttaaataagtatagtttatttaccacagcatttgaactgtcaggattttactgtgaatgctaccagaaaggtttgttctatttttacgagaatcttcttagggaaattgatgaacctggtaacctaattttagacctcctgaaatttgacagatggatggtatttatagtgttctgaatcggtccctattagacatttaaaaatagtcacatcattagagaatacattcaaaaaagaaaagatttttaacccaaaatctaatgcccagaaaatttttagtctcctaaactgggtgtgcattttggtaacagtttctaaaaagcctttttgtactctcctcattctctttcctgtgtgatgctgctgttgtcatggaaacagatcttggagttgctttgttaataccgtgtaagggactccctgaaatggagagttactgcaggtcattatcatcaacacagagctttaatatcaagtgttgtgctatgatgcgtacactacaaagcacagaaatctgtgtttggaggttacactaaagacatttaaccttgacacccataaacactacacaaacatcagggtcttcagtcatagaacctggaaaagtggaggcaatgggctcatgctatttctattgcagatagtgagctatgtcctggtttggggccggccgttgttaggtgctccattagggctggcttattgagaaaggaggatttggaagattgttgagtgaatccaggaaaggagcaagccgaaagttcacagggattgttggaaatttccaacaacagtttagatggaaattggctcccgggatgaaaaatggctgtgcatattgtgtttgagtgcttggaggcctctagctagaatgtttttattagcaagtttatagcttgtaagatggtccagtcagatattcatgcaaggcattttatgatgtacgtgattttgttgactggggccttaaggtgggaaacagttggaaggtatagtggactcttgctgccctgggactatctcttgcctccccacttatcagcaaattccataaccttcctggccctcggtttcctcacctttcaattggtgattcttttacaagttatactgggaattaaatggggtggatgatgataaaggatcttgaagcgcctggtgcttggtaagcactaattcctccagcccacactttctttaacatttcctatgccagcagttctcaaaggggcttgccagacctcagcatcagtatcacctgggagctcattagcagatattcacacaccacagatcttctgaagcagcaaggcagcggctggggcctggcattctgcatttcccaagctctccaagtaatgcctatgtttgagaatcacaaccctagactatgtttctggggccaagattaccttggatatggttgagtgcagttctccttaccatgtaagattcctggcaattcccagagctcatacacttcactgttaaaataaggtattggagaaggtggcttttggattcctaagctattggaaggccaggataactggtttgttttgtttgtttgtttgtttgtctgttttggctgaaatgcagtgatctgatcatagctcattatagcctcaggtacatgccatccacactaataattttttttttttttttttttagacagagtcttgctctgtcacccaggctggagtgcaatagtgtgatctcagctcgccgcaacctcctgggttcaagcaattctcctgcctcagtcttccaagtagctgggattacgggtgcctaccaccatgcccggctaatttttgtacttttagtagagatgaggtttcgccatgttggccaggctggtctcaaactcctgacctcaggtgatccacccgcctcggcctcccaaagtgctgtgattacaggtgtgagccaccatgcccagcccaccgtgctaatttttaaatcttttatagagtcagggtcttgctatgttgcccaggctggtctcaaaactcctggcctcaagcaatcctgcctcagcctcccagagtgctgggattacaggtgtgagccacttcaaagaacagaataactttgaatgcacagtttgtatttgtcttgctatcaaaaggcacgttaagttcaacttatcaaaggtaatgcagttagcaaccatttttcccctaaatttcaggtatccagatttattatttagaattatactttctccttgggctaaggaaacagttggccacacttttctactctatattcttcattcctattccaatgtgactgctgatttctgacttttaaaacctaaaagatttcttcctaaacttatcaggaaaagtaaaatgactccagtaccacttgccactgctattttagagacagtgaaattctctgaggtctgtcattcctgattttattgctttataaaagcctgctatagaatgttttttaaaaatacaatgatttaaaagtctccatgccagggcagcactggcaaatgaggaggcaggaggtcttcatgtaggagatgcttcggggacagtgtggcttgtggcagcctcaggactctgggcatctgtccactcagtacaaaccaaactgcagctccaactaattttgatttggaaattgcccccttaaaaaaaaaaagtactaaaaatgtttgacatttaccagatttctgcagcagtctgcagtttctcttgcaagtatattcacagacagtgaaaggaagtatttggcaattgctaactcatgtttttatatagtgtagaagtccaaagatggtaataatgtcatattatagtgatggcgatctatagtgtaaagtataatgaccataaaagagttctcatttttatagtttttaaacatgatttcagcatccagaggcaaactcctatgtaaggataatggtcgtgcatggccacagagattttttttctttaattctcaattgcttttcacgcttaactttttctaataagtactatctcccaagattccagaagatggtacaaatgagaaaataaggtttatcttttctctaagaaagactaaactgtgactttttttttcctttctggctaattaggacaacaaaagtaaacatccaattatgcagtgatgaatcaagtcatctggctggagctggattctttagtgtgttaagttacagtaaatattgaaaagaaggactttatgcagtaggactgttttcaagaaaaagaagaccagtctcagccaaattcaaatatcttgtagagaataaatgcctcttgggtttatggatttatgccatatgtgtgagaagagaaaatacggtcaagaattgttgtatttcttgactctttgaaaggcaagaacactggcttgggaaatagggacacctggtttctagtgttagataaatcttcagaatacagaatgctctttgaaataacaaaatacttgagtgaaggaaagaattgaggaatgaacttaaatttagctctgaaagaattctttcttcagtctgtggttcccttagctactattcaatctctcatttccatcttagccatattttagcttccaccctgtatgacagagacaggggtctttctcttggtttggagcacacatccctcaacatgtccagtagggagctcctgggcgacgggtcctgcaggtggatgtggaccaggagccccgtgggaggaacgtgcccctggggagagctggtggataccccgaatggcaggccacctggggcaaagccagtggaacctgactatggcaggatgagaacaccagtgttttataatgcccacttttttttcacttcttgcagtttctatgtttatttcctgttagcatttagtagtatctttatgagtttatctcagttatgctaggcagaaaggagctcttgtcagttggcaggaccgaaaggagagaataggcagggggaagaggggacagtaatcgaagtaggagcaccttgagcgaagtgaaatgtgggatggaaatggaagctcctgtttgtgatctcccagagaggctcagtccagcgccaggtgccgtgtgcttgtggaataaagagaccgaattccttctgtactgggggttcatgctgaaccccacctttgttgaaggggaggaaccagctgcccaaggcaaactagaagcatgcttgcaggagggaaggttaagacacacagtttatgtgcatagcagtgaaaaccatagtgtctgttctgaagtttgggaaaatagtgtgagactgtctagctgggtctgtcattggctgatgtgtagtatgtgtgggtcgctcactaaaaaaaaaaaaaaaaagaagccaggccccaaaggaagagggcattattcataatgaaacctactatgaatccagtggggtcttgatttctgcttcttcctgggctgtgccaccaggacttccttgatagacctttggtgtcatcatgaattctgttactgatcccggaataaagatttggtgccctccggtttccaacagtatccagagatggccagggaggatttggatgggaaggattaaagtttgtatacaggagagaagacagtactctctgaagtgtgtgtggcctgagtcacctggtagaggtgggcttgggtcaggttctggtcacactgtcattctggctgcagaagaagaagcaagatgagtcaatcagtgtaggatttcagagtgtggggcactgacttcccaaatttggctgcacatctgaatcacctgggatactttccaaaatgcattcccccagttcctccccgaaattcaggcaggtcattcttaggaaaaactgggagttaaaaagcacaaactttggagtcaaatagcacttgggttgaatctcagcatcaacatcttttattggttgtatgaccttgagcagggcatttaacctctccagaccacagtttgtctgtgggcagaagacaaacaatcctacttatttatagagttttgggatgaattagatgaaataatgcatttaaaatgcctagctctttgcccagcatatagtaatcattcagtaaatattagcttatgtttaaccaaaatgtgtatgtcagatccctgcttagtactgtgggaacatgcaaaagaattagaaaaatcatgctcccttccctgaatatggctgagaaaaagcgaatgcacctgactatttggtgagttccggcaggaggaggggacattgtaatgaagctcagattgccggaagatgctggaaggatgcactttggacctaaggcaggtccagggtggtgcctggtggacatgaagaaggcagcaactttcagagcgagcgtcagaggggcttgtaatgaacagaattgccttctgatgatgtcaacatatctaatacaagactctgactaattactatttatagttgcttatattcaaaagcttgtttatgctgcaagtaaggctgaaaactgtcagcagggtgtagtggaaagagctcagagctgagtctgaactcctcaatttttatcccatctgtgctgctgactagctgggtgacatcagacaagcctcgcaactcccaggcctcagcctctgcaacatatacagggtgtgtgtgagtgggaggagatgggggattagacaactgctagggtcttctggctccaacattcaacaaaaacatttactgcacttctttcccaaaacttactgtgtgccctgattttcaattcctgatactctgtaaggggcattgttcagtggaagactgtgtgttttgctaatttgttgcttgcaattcagattcctttaaagttagcaaagagcatttttgttacattggaacaatataggaagtatccttcattatgctttcatttgtttttgagtcacaagaaactgttactgttgttttgggagactgatgtgggaatgtcttagcacatcatttctctactctaattttaaatacgggtagtccctgacttataaacagttgacttgagatgacccatatgtacagttagtactatcttagatgtgagaatccagttctcatctcctactgcagagctcttctgtaatttttcaatcagaacacctaggagatgtctattcttctcatttcacagatcttcactgcttgccttttatgggccaggttctcttctgtgccctgggtatccagcagtgaactaagcagacaaatctctgtgctcacagagcttaggttacagtgccattggcctggaaggtacgcttgcctattgccccaggtgaggaggagtctgtgacaggtatctgggtctgtcttcctctatccaagatcacttcccccacctcttccctgcaaggagactaaatcataaaaccacaatgcctttttatgtagaaacaatagaatatgtgactgctaggtatatgtagtatattgcaaagaatagccacagatcctcccatcctggttacatgttctcttataacgtgtctttgccatgctttcagtcagatgtctatttctctactcctgtgagtcaagtggctttgtgacttcctttgaccagcagaatgcagtgcagttgacatcatgggagttctgagctgaggtattaagagacctcacatatcccactcctgcttcttcactcagaacttctgcagccacagaagttctgattaccctcctggaggatgagagaccacgtggagcagaaatgagtgtaaaacaaaccagcaccattgagttaggccatcaggcacctgcagctgcatgagctttcaccagcttaaagtctcaagatgctcaccatcagcatcatatttttttgttactaataattgaaagatgtaaatatttatgaacttaatatagatattaatatatttcctatttgtcatgaatgaaataggccctggaaggttggcattggaaaatgcctttcacattttggaccatccacttagagacacatttttggaaaagaaccacttgaaatctggtgcccagctgtacacgtgttttgtggagagagacagattagcgctggcacgtgtgagacagtggttagtgaagggtggaagatcgccagggctcatggacctgcttcagatggatgtaaatagttggagtgtactggaaaggtatgggactaacatgaccctgaccagagtttggacaagtgtggtttcattctgggggactgacacttatttctttcctagaagtgttgatgaaagtcatgactcagtaatatcagaagtgtgggaccaaagtggaaaataaactcctgacttcatgaattaaacagaaacatgtcagggccactccatactcttcttcctgtcttccaaaagtctctttttttttcaattcagaagaaggtctgggaacattctgtgcacataattattttataaacaatattttatttaatgcccttgctaataatacttcctataaataaacaataagagtcgtcatggttccagattgcctttatgataatgatataccatatgtttaaagaaatggtctaaaagacatactgctgtgattgaaacatttttggaaattgtgtatgctaactgtatattgctctacagaaatctgttttgatcagtggataaaagcagctacacataactatgaggaaatcttgagaacatttattagtaattaaatatatagctgaaatatgtgcctatatgtatatccgaaaattattataggagatggttttcagtgaagatgattgggtggctttgaaataaataagtggtttggtttatgattaatggatttattaatttgctatggtcacctaacaatccaccccacaagttggtggctttacaacaacaatcatgttatcgcttccagtcatgttatcacttgcagacataatctgcatgtcacctgagggttggctgatttcacctgtgctcagctaggcatctcggcctctcattgtgaggctgtgaatggactctgcgccgtacctcttctccaattctgacctggggcagctagcttgggtgtgctcttcccagggctaagggggcaaggcaaacccaggaggatgggcagaaacactaagtctggttcattctaggcttggtaggggcatgtcgttacttctgtctcattatgttggccaaagtgagtcacatggctaagctcaaagttaggaagcagggaaatagactgtatctttaggggaggaatttcaaagtcatatgaaaaaaaaggtatggatactacagccagggatgaacatttggagccagtaatgatattcacccctgtgtctgtgtgactcctaagaagagccaagacttgttaaagatgagcagagaggtaaattagtttggagatggtgaagaagcagtttggggatactttggtctgcgtataacattgaagacacctgtctttccttgtataccaggggttgcaaactatagcttattgggccacatcctgcccaaggcttgttttattggaacacagccatgtccagtggtttgtgtgtgtcttgtgtgcagctgctcagccctgccacagacagttgaatacttgaggcagagactgagtggcctgcagagttgaaaacattgactaccgggttctttgcaggtaaagttagctgactcctgtttgatatgatgcaactggatagaatccatttggctataatctccgcctctctacctgcccaccccatacccgccccagttccttttaggattttcctactgtgctttgcattctcattattctgtgtttttataaaataggtaaaataggaggtaaagttatcctggtgcctggctgttggcactgatgaccaatgcaatttgcatccacaggtcataatccttaaagtttataaggcgacaaattgcagattagaggacatacaaatgagggagccagttgctacttttgcctttattattaatgttttgtggctctgcgggtcattcatgatgttagacaatagggtgattatttctgttctgctgaaagacaatctgattgtgttttgtgtagaatgaggcactgatccgctctgcctgcctcccatgagaaatgccgcagacctttgtctgctcaaacctcctcccgtcagctctggtattgtgatggaagtaattgaccaggcctcatgggtcagcatatatctgtactgctgtttattcttctttctactttttaaggactaaaatcactttcttgtaaaatattacaaagacattttaaaagaaaagactgtccattgtatttttccacccccttaaaatatattcataatgatctttttaactgggtgggacttgatttggtttaaaaacaataatcttggtgactgtatggaaatacggaaaatgtttaatacagtattccattaaaaacatgatacaggttgggcgcggtagctcacgcctgaaatcccagcactttgggaggtcaaggcgggcggatcacttgaggtctggagttcgagactagcctggccaacatggtgagatggtgagaccccgtctctactaaaaatacaagaattagccaggcgtggtggctactgtaagcccaggcatctgtaagcccagctactcaggaggctgaggcaggagaattgcttgaacccgggaggcagaggttgcagtgagccgacatggcaccactgcactccagcctgggtgacagagcaaacgaaactctgtctcaaaaaaaaaaaaaaaaaaagatgcataattgctgcaggtatgtgattgtaaccatagaataagtaggtatgtacatgtggtagatagaatgatgtgccttccccctgaagatatccatgtcctaatatccagaccctgtgagtgtttttcctacatggaaaagagcataatgcagatgtgattaagttaagggtctcgtgagagattaccctgggttatctgggtaggcccagtgtaatcacaaaggaccttctaagagtgagggatgaactcacaaaaggatgcagaagcagagttgggagggttgcccttcaaacatggaggaaggggccatgaaccaaggaatacaggtgacctcttaatactggaaaaggcaaggaagcaggggcccccggaactctgcgagcacctccattgtagccttatgagactcattttggaagtctgaccccaaaactgtgagataataaatttgtgttgctttaagtcactaagtttgtggtattatgttacagcagcaatgaaaaactaatatggcacataagactggaagggaagatattttaaaatgatagttggaagtacagtgtattttagtttgtgtattttgattgggtgcttgtgagtttactttggttggttaagactaagaggcaacagatgacttttaaatgttagaggagggaaaaatggtagagtttcaagttcacattcaagtacaaatgatgaataagcccagccaaattgttctccagtttgggttttgatgtattgggttcaaatggttccagccttaatggagaagccagtttcttttttcttgttgttttattgtttttaagcctctctctggttttcagtagagtttgaccttaaatatcatctttgattactattggtgtccttgtagttaaggtctttgcaaaagtttgagtgcaagttttaagctaaaaacacgtttttaaactttcacaaattttgtaagatgacaatagcattctgtaacatagacattatggtaatagtgattttctctccatccctattttgtccagcgatttccaagttataagacgtgaataagactaaccgctcacttccaccagcagctgacctggtgggcttttgagttcaaagagtcatttcttcatcttacctccagcactgcagggccgtgtgaccttgcagagccttgtttctcattgatgaaaggagctcatgcctcatgaagccactggtaagggccatggagctcacgggccatcaagcttccttcccatcacttgtgggtggaattgacattacccgatgagctcttcctggggtcacctgggagggagtggcccatgggtggtatgacaaaatctcatagtcagtctttgcagttttctccacaggtaaaatgagattttggaaaattttcatttgtttgtatttgtcccaaggtgagtcttacatattttgagcaacaaaacgaagatcattatgaaaatgtccttatggaagcactctagggccattgctcatttttatgagtcctcgtgctaagtccctgagtactgtggctcatgtcttagctggctaaatcacagtcaaaattctcttcttaagcctcaaaataagctgctgattatactgcctgttggccagactaatcaaatacatttgatgtttcagctgactccagatacttttccttcctcctccttggttctttaactgtcatcccagatctgcgacatgcaataaggaaaactgagtcagggaggaagtaggattccttttgctgctaggaaccacgttagctttggattgtccatagaatgcacccttaacagttcttggaaaatggatgatatttggttcctgccccatgttcagtgttctttggcagctgcaaagcatatcctagctagaatccttatcgtcttgaagttcatcaaagattttgaacagtcatggtggagatacaacctaagtacattcatgcccattgagacaatcctttggtttgagcgacggaaggaggaataaacacatgaatgtattttattgaatcccagagaccctgaaacaccaagactcattaatatatgcatacatggatggcagaataataaacctcacctgacctgtcagtgtactctcagtttttaaggttctcccaaaacagggaaactgaaaaatacttgggcagaaagaaaatatcatcaaataacacctatttcttttcagctatagagatggctggatatcaaaagcaccacgggagctttgcaatttgctgcctcttttcagccctcagcttgactctcagttttcaagagggagaaaatgaatgtttcccagcattctctgtcctttgctccaaagaagagagcaggtgttggcttccaaaccttccgtattttcttattgctgttagggggatcaactgcatgtttcctgagggaaaagggtggctcactgacctacttgaaggcattctctcagtggaagctgggcaagagaatccagggatttcttttgcaggtttctgcgcagtgcccctgccatcaagctgcctaaaatgtgaatattgcttccctgcgtttcagaggtggtaatattggggcaagtggtggaggatctaaaaaaaaaatcatctttgtgctccctaccttgcccctggtatggattaaacagccaccaccctccttctcttataccctgggggcctcctgacaatacttccaattgctccattgattacttagattttttgggacacaagggcccacgttgtgtcttcctgacaacacttttagttgctctattgattacttagatttttgttggcaattaggagcttttcagtaacattctttgctccatcggtagtctctgctggctcttgttcactcaggaaacacctgagcacagggcttcaggaaagccttctattaaatgggcagaggccccagcaggactcctgcatgttcatctgcacagccagagacagctggagggcaggaggagccgcgttcacatagggttctgcagccttggagccgccgtttcttccaagtactcttcagatcagtggttcttagccctgcctgaactgcagagtcctccgaggagctttcaaatgaagcatggcagcctgggcaggttgcaggtccattaaatccacatctccggggtgggagccggtggcatccttgctttgccagaactcccccattgaccctaatgtgaaacctgggctgagaggccctgcctaaagctcgattattttcacctgtggatgtaggcgatcgcttccttttgtggctgttgtcaggaggcagaaaatcccctgggttgttggctccctggagtcttatttttacagagtgccctgtttcaggtgcagcaacctgactgatgtttttacaaatcaccttttggtggcctcctgtcactgctgtctcccttcaagggttaaataagcctctctcacccattccttttcacacctgtgtcgtgtattattggcaggcctcagtcctcagggtgtcaaatggaactgatggatgccagacattgtggatatctgcaagtcctggttggtgaccagggacttgaagagtagactttcttctcaaacttatctttgtgctgttttccttccccagacctcatagtctggagcccatgtttccaggggtggaatttgattttcccagagaggagctgtgttcggcttctaggctgaggagctaagctgccgagcctctgccagccctctgtggattcgctcctgcattattcagcgcctttgctgacagagcaccatgttccactgctgagcagatcagggtgaatttccaagagggaacattgcagatggttttgcctttagggatggattttcttactcccaagtgactcacttctggtaaaattaaaaaaaaaaaaaagaacaaccttgagtcccttgagtctgtccccaccatctttgctcagagggaattaaggagccaattcagagctttaaaaaagtcacgtgatgattcattatctttttgctggttgtttcctgccccctccccccccacccccacccactgacttgtagtttttcataagcatttattcatccttgaattttattttatttttttatttttttttgagacagagtcttgctctgtcacccagggtggagtgcagtggtgcgatcttggctcactgcagcttccgcctcccgggtttgagcaattcttgtgcttccacctcctgaggagctgggattacaagcatgcaccaccatgcccgactaatttttgtatttttagtagatacagagttcatagccaggctggtcttgaactcctgacctcaggtgatccgcccacctcggcctcccagaatgctaggattacaggtgtgagccactgcgcccggcccatccttgaagtttaactgcaaccccatctccttccctctttgcatgggggtaaaaccctactgcaaggactcactagaattccttccactcacatcccctctgatgatctggccttgctgtcaattgctgtgaccatggacaagttgccttgctgcctctcctgaacatgggaggtacacaaggcctttcttcaggggtttattcccagcagctgatctgctgctgtcggtggaattagtttgcacacacagcatcccggggagtggaacagtgctttcttagcacaaaacagacacgtttgcttcccttctttcagtgaaggggaacccacggctggaaaatactggaaggcaattgtaaccttaggcagccaacaacacttcagtcctttggaagtggattttaaggaagaggagacttcaaacggtagagctctttgtgatgtacctcttagagaatacctttttgattcctacacttattctcctctcaccaagtgatacttaaagggatgccctaaaacagcagtaaagtcataggcccctttttataaatttcatgaattcactacttttttcccatcacgtcttctcttaaccaatgtatctgcatttggtttgcgtaaaagaagaaatgtttcctctgctcctgggctcaccattaattctgatgagataggcctttctcctctaaaggcaacagggcattggccaaatcccctgttttactgcatccctttttggagctcagtattggcctgtcctgacccccctggtttgcctcagaataattattaagggcatgtgtcttgaaacaagtcgcacccaaggctgctagcctgtgtattgactgcttgatttataacgaatgctgaatttggctaggcaaatgagaaacgtggtagggtcagccttctgcctcctcctggtttacagactcatcttgcccattcatttttcccatctaaggctttaatttgatacccagtgggttggtcttaagcaaccaggcaagatccagaggagactgtccaggctgccgcccccactggccaggcagaccccgttccttttgcgagtttcctgcaaggctgttgttgactcgggggagcggcttttagttgctcaggcttctttctgctgctgcagaggaatgtgttcccctgtagaggctgttggaaagggcagtgcagacaagccggcttctcaggcatttaaacaagttgtctggaggttgtcagactctgcagcgcatcagcccctccttttgttcgttcgtaatgccacagtgtttatggagccctgccttttggaggagtgggaagtggagcttccaactgttagcctatgtgtttctgtcatttagaggcaataagaagaacatgaccttttctggaactgctgccccccgcaccccccccaaaaaaattagaaaatggttagttttgattacattcaccttgaccactttcttcccaagtgaagctgaccacgattctttgttggagccaagtttttgtatttgcatattcccctcgggtaggaactgggtcagttattattgttctaactagcaggcggaattggggtctctgaggcatgagggagattccattgtcttctgtgtattctgctggtatttcatatctgatgaaggtcgattcttatccctaattgacttcctcttgggttttgtagtctgagtatttgaaatcacatgttgattgggctgggtgtggtagcacaagcttgtaatcccagcactttgggaggccgaggtgggcggatcacgaggtcaagagatcaagaccatcctggctaacatggtgaaaccccatctctactaaaaatacaaaaaattagccgggcgtggtggcgggcgcctgtagtcccagctactcgggaggctgaggcaggagaatggcgtgaacccgggaggcggagcttgcagtgagccgagatcacgccactgcactccagcctgggtgacagagcaagactctgtctcaaaaaagaaaagaaaaagaaatcacaagttgatctttctgaatgttggggcccaatgtatttgagtaataaacttgtaacatgagggaaatggacaagtgaaccttcttaaggactcatggtaatttgactctctcctgtatgattctttactgacagtgacatgaaggggaattgcctggggtagacttaggctgtctagtgtcatatgctgcttttattaatccggagatttctgattggaatatatttccatttcaatgggattagagtataaagaatgctttgttacaattatttacttacaccgccaccaccgtaagtaataatagtagttagcatttaccctgtgtgtgttacctataaggtgctgttctcagcacttcatgtgaattattcctcaaattatccccaaactctctgagactgcgctgttaccattttgctttgtagctaaagaaacagcttagagaggttgagtaactcctccaaggcatactcagcagtaggcaggacttgaacctgcgttgtgatttgtgaattcccacttttaaccacccttcactgcccatctacactgcctcttgcacatctcatattttgccagatgggaaaactcaccaaggatgaagcttccttaagatctttttgagtataaataggccatctgttgatctgtgtgtccatcaggttaggggctcttacctcaagccaacatatggcagaaaagatatgtattgatgtcttgtgggatagttaataaaacacaaatgtgcagtgcagcttctttaacctgctccatcttggacccaaattcccccacccctgctgccaaacaggcctctaactgatggggtgggtgtccccatcagctctgtgctggcccagcttccttggggttggccctcaccagagtaagggcacaaaacacagctctcgaggggttctgcagacgaccagagcctgagaccttttcttggcagctggtgtcagttccctgttggatctgtccttcccttctgaatcctagtgggatctcctcactacctggtcactatctctgttctcacaacaagatttaaacaattataggatatcagtgcactgtgagaccacaaactcttctagtccattcccctccttctaatgaggggcccccacagctgtggggttgtatcatctaagccagacctccagtttccttttcactaaaatacctacctttgaaataaaagtgaaaacttacatcaaaacagcatcatgcctggaacatactgaatggacagcatttcctttctttcccctccttattctcctgattattaattatttgcctgactttggatagctattggcttctgtcctctgatattaatgtactcataatttctgtttcttacctggttttggactaattgctctatttttatttttattttttggcacatgctctgcctctccaattctgacatttcttgcagtcctctcagcatatttctgatcacagtcccaaatgacattgagaagccctgataggaaaatgctgtgtaagaaatatgagttatttgtctgtgtgactagaactttcctggtgtaagttcagaactttccagaacttccctgaactttactctgtccggttcagaccatctgaatgcagatgtctgacttggggatagatcctccactgatcaatcattcagagaaaagccacagaaaacacacaagattagaaaaataaaacccacatggaaaggctttagtgaggttacagcatagattatgcagtctgggaaaagaaggataatgcagattaaaatatctgaaatattagaatagcataaatgtagttaacttcggagccggaagaccagggttgaatcttggcttcttcccttactggccatgtaaccttgggcttcttgcttaacccctctgagctgcagaaggggggatgctgctgttgatgtcatcatcaccaatggcagcagtagaagctatcaatgatggtggttatcacttttattaccattgtttttagtaaggagagctaacgagacaggctccaactgctcttctcccgtgggaattgcagttttctgcagtggatcctgtgacagattcctgtggattcctgggacagacttagccacctgtcctttcttctatcctcctgtactcatcagattgagcaccatgtgggtccagtccctgagatgagtgcttgatagatagaggtgaacgatgggggcttggtcttacagagctgacctgtaaaatcctctccaccatatccagtgcatacagctgggcattctttgtgtagatcaccccagttattagaacctctatttcagtaattcactctctgggctctagttcttccttgtgaattttactctcagggaagccccgactgtgctcctgaagctgtttttatttgtagtaatttagcatgcgtccaggaattgaggactcttgcctacccaaaatcagaggtggggaggaaaaccacggtatttcagtccttttgttctttttgaggtctgtaattcaccaaagccaggtccaccaaagtaaattattaccataatttatggtgagaattatttggggccacagatgtcaagtggaagcttgcaggtaagtatgattgagaaagtacaaaattttgaaatgaactctaaccttatgagtctgttgctctaaggatctaaggatattaggaggtagtgttaagaatcacaactgcattgttaaacgccaagtgttctttgtgatttgattgaaactgtagttgggattcttcaggttccatatgtggggcaacatttaaatattaacattcttgggaagattttgtatagacagctttctctgtcatccgaatgccgtgtggtcttcagagcatgtcataagaaaagtcatgagacacaaatctgatggaactttctttagcatatgtttaagacttgtcatcttcccatctcatctttgcagtagaaaaataccaacgtttccctgaacaaaatagaagtattttccacttccccatttctgaagctcctagacgttttatatttcttttgagtaagagattgctttgtatccaggagcctttgcatggtgccttttcttttactggtttgtttatttgggagatggagtcttgctctgtcacccaggctggagtgcattggcatgatctcggctcactgcaatctccacctcctgggtttaaggggttctcgtgcctcagcttcccgagtggctgggattacaggttcacgccaccatgcccagctaattttttgtatttttagtagagacagggttttaccatgttgcctaagctggtctcctgagctcaggcaatctgcccgcctctgcctcccaaactgctagaattacaggcgtgagccaccaccacgcctgactccttttctttttcttgatgttactgaagactttattttggaagtagtgagggcccagagctgatcccttctggagatgtgtcacagggtaaagaatgtggctttgaaactccaactctgtcacttaaagctgtgcctctttcagagttacttaaccactctgaaccttagtttcctcttctgcaaaatgggagactagcaacctgccacccaactgactgctctgggctatttatgagacagtctctgctctcgggagacatccctctttggcttattcatcctcactcatctgcgttggagagatgcacttggtgcctctcctgcagaaggggtgttagggggctgttgcgtttgtcaccagggaggtgatgttttccccattgggaaccctaggccagcaaacttcgagaagtgtctgtggcagcttgaatgctgctatttaagagttgataaagaggcagcttggagaaaacctcaagcttatttggttgagtggggtggctgtgtgagaattaagtaatgagtagacctgaagcatctggtgggatctccagcagttagtaaatggcagctgtttttattctcatcccttgttggcagtactgtccagttccagtgatgggcattagtggcatttgggatttgaggataaccttcataggttggaatgagtaccgtagcaaaacagaattctgctcttagccagaaagcattccagttagcaaactacctgacagtgtaatgtgcccagaggacccaggagggccatcccagggagaacagcatcgccatttctgctgaccacatgctgtctcctgagccccggtatctgaggccctcatcgaaggcataggcatattaacagttatgctgccagacttttatcagcagtctgtacttctccttttatcttctgaactgtgatgaaaagaacagtccactcccttctgatctcaacacttaccaaagctcatctgttcacaggcaaatgtactaaaacattttttattggagactgagtttcatgtgtagacatcattgtatttctgtgtggtgtcctcagattttcactcttgttttttccccagctgccttttttaaaaactcctttgcactcttaaacgtcaggctgagtgtatgtgtgtaaataaacgctttgggtggaggatattgttctgctgtgacaagccatcaagcagcacagcaagaaacaatacttttctaatttgtgagttattcttacgtttcccttttgcaaggctagttatttcattaaattcatttaatttaagctttgaaatcttttttttttttttgagatggagtcttgctctgtcctccaggctggattgcagtggcgtgatctcggctcactgcaagctccgcctctcaggttcacgccattctcctgcctcagcctcccgagtagctgggactacaggcgcccgccaccacacccagctaatttttttttatttttagtagagatggggtttcactgtgttagccaggatagtctcgatcacctgatttgtgatctgcccgccttggcctcccaaagttctgggattacaggcgtaagcaccgcgcccggcctaaggtttcaatcttaataagaatggctaacttttagatgagagttttacatcagaaaacctcatcgtacccagagagatgcttctttaattcagatttgaagggatgagtttccttgttctggattaaacagctcactcagacacaccaaatgaatgcagtgtgcagtcctaggtggcaccaatcacagaagagtgaaaagcataaaacagttttagaaaaggtcaccacacttagaaatagaaatccacccttgctcacgcaacccgagggatttgaaaataatttcgaaaatcaatttaaacatgtaggccacccgtcttttggagagatgcagttggtgcctctcctgcagaaggggtgttaggaggctgttgtgtttgttgccagggaggtgatgttttccccattgggaaccctaggccagcaaacttcgggaagtgtctgtggcagcttgaatgctgctatttcagagctgatgaagaggcagcttggagaaaacctcaaaaataaatactctgattcatcattgttgttcaggctttccagccgtcagagccagcccagggttctgagacaaagggtaacattcagcacagagcccagcggagagtctggagccctgactgtctctaaaagagggggcggagagggaggcagctgcctgcaaaccctggagtggggcttgacgctggggggacggcgtgtgctggttttgctgctttgggggtgaggagaggatgaataatccaaagagggacgtctcccgagagcagggaccatctcataaatagcccagagcagtcagttgggtggcgggctgccgtgcgggggctgcagttagaagcagcactcggagtggagtggggcctcccagcggggccctgctgcactttgtgagtgctctgtggtcgaaggccagctgggcctgaaggcaaaacatctggattttgcagagggttcctaggctgagacggaattcaggctgtaggctctgtgagaccttgtgtgaaacccccggttctgtctctgtcacttgtttgagtctcccatttctctgtctatcaaaagattgaatatggtggcttacaacagaggcagtcgagggtaattattagtatcatggtttgacctcgagatctggcacttcctggacctattccgttgtatatttctctgtgcactccctgagcctcccttttctcagctgagaaaatggtcacacctatggtatcccacactgtggaaaatgaccaaataagacaaggtatgtgcaagtatttggtagaaccctacagaggtaggaagtggctgttactagctgtttccactggtattctctggccatctcagagctgtttagggaccattccagctacaggggagggcaagatttagagtagactctcaaatgagtctatctgattctttggaagcacgagctctagtaagatagtttgaacaaagatgtgaccatgaggggttttgttttattttttaactagattttgatatgttgtgtgccgcttctccactgcacagattgaccaagagttagctgcagattgtggctcagtaagaaggtcttgtggtacgtgctcctgcggcccccacctcaaactcttgcctctggtgttcttgaaagaaatgaggggacctttgcccgagccaagggaaaatgcaagattttggaggcttagcccctttattgtttttttcctctgttgcttatattgatttctgcggcaaagagcagttgactgggattgaaagctactctgctggtcttggatgtggaagaaaaaataattcccactttccaaatagaggctcatccagaggcagcagatgccagaggcagcagatgctagctgcagttctgcaggcaggaattgcacgtgcaaagcagagctgacgtccagtccacgcctcatggcactttggaagtgcatctgacaccgtttgcctgccatacacaagccacaaagactttttgaggcgacaggttatgccaaaaattaagtaaaaatgacacagcttcagatgacatttacatatctatttttgaggtttcagaacatgtgccctataaaaatgtacaactgcattgtttaaaactcttctgagtctctgaggattttctatcagtgcatgcctctcagttatcacttaaatgtcaaggccctaagcttgtatgagcccctaaaatgtttttgagccccacagtaaatttttggctgaccacatttgttctatgtaaggctgataacaagccaccacgtggaatctcacagtgggactttagtatcaggcaattgcagagtcctgaagctcgtgttgcggttattatggttctatataaagccccaggggagaaagtcatttcatgcttttaaaattactagttaatgtttaaggagtttatacggagtggactgagccaagcattttccccttaactttaaaattattacagagaggccttaagaaactgttctgtattagatggtgattaaaatatgacctttttctttctttatgcttaggattttcacgatgtggtttgcaattaatttgtatgtgcacagtctttgtgctagtttctgtggacatacagtggtgctacttggccttaagagcttcctgtgtgtggttgggagataggcagttagtaagccatgtgtgctgtgagaaaacccagagcatagaagtcgcacatgagagtaccaggtgctgagtaccatgggggtgagagcaaggagggattatttctgccccaagaaggcttcttgggaaatagagcagttatgaaggacctggaaagatgttccaataagacttgggtgaggagacacaatagtcccaagtagggagggcagagcaccctgagtagaggtgtggtgtcaggaagtgtgagaattcttcagagactgatagtcggaagggattcctctgcaaaggcctgtggaaggatatgaaggttggaaagacaagtgggagccattggggagtctcaacaaatgtgtattgtattgtgtgtgtttcacttggaaaattatcttgctattaatgagaaagtacagattaatgctttttttgttttactggattcaaattatatttgacaagtcatttcattctagtgtatgcatgtgattttcttggaacgagggtaacattttaaagataggatttgatgagtcaatgaggtatttttcaagtagattacttagaaaatgttatagtcataaaatatcttggagttacagttaagagtcaattattgtttcatctataggcatccaattaaagttgaattatgctgttattttcactcaatttccaaagctatgcacttccgtaatttctatccttgtttatagtcagtataatgtttaatgcaatgtgcctgatttagcactttgtgttataaattttgcctgataaataatcaacttattttcttccgtatgacgacagttttcttcacagtgaatggagcttagtgtatttatataaaatgtaagtctgggagagtttccattatagttcaagtatatttaatgttcaaaagaatgcagtatttgtggtttcctggcattctttgaataccatgtggctcttctctcttccttctcaccaaaaccctagtcattttattatttatataatgagatactgtaagatactaaaacataagttattgtgaggtctggcttttgatgctatgaagtaccctttgttatttgagactaatgaaatgaaatcagtgagttccagcttgtctactagtatgttgcttgaaacaattacattcttttgaacattaaatttatatatttgaactataaggaaactctcccagacttgtattttatatactctaagctccattgaccatgcagaaatctgtcagcatatgagaggaacaagcggattatttatcaggcagattttataatgcagaaatacgaagcaacatagtgctgtggtgaagacagaattgaacattgttagacacttagcaatcccaagaggcatcatgaagtccatgtaccctacaccatagaaaaggctacaccccaaagttctggaacaagcctggtttgctggctttctggtgtcaaatgtcagaagcagaaaatgggaggatggtaaaacagtagactcagtgagagcaggactgaacttcagcaggccccataattgtacagaaacaagattgctaggctgggtgctgtggctcacgcctgtaatcccagcactttgggaggccaaggcaggcagatcacttgaggtcaggagttcgagaccagcctggccgacttggtgaaaccctgactgtactaaaaaaaatacaaaaattagccacgtgtggtggtgcacacctgtagtccctgctactggggtggtggggggagctgaggcaggagaatcgctggaacccgggaggtggagactgcagtgagccaagatcagaccactgcactgcagcctgggcgacacagcgagaccccatctcaaacaacaactacaaaagatttctcatggccacttagtttaggaagaagacccccatgtagttcatgaacccaatgctgtgaaccaaaatactataaacactagtattctaggtcaccactgtgatcattgagaaaatgttgaagtatattgacatattttgtttaacaaaacaagggacttaaagtgcgttttagaaatatttgtatacatgctggtttaaaaaagaaaagactaaaaacaagccttagtacataaaaagaaaatattcagttttccagaaaatgaggttactcccttacattgagagttacatgaagccttgttacagtacttttagtcttctttattcaaagaaagaattaccaatatcattttttttttaagatggagtgagtcttgctttgtcacccaggctggagtactgtggcatgatctcagctcactgcaacctccacctcccaggttcaagccattctactgtctcaccctcccaagtagctgggattacaggcatgcgccaccatgcccagctaatttttgtatttttagtagagatgggatttcaccatgttggtcaggcaggtttcaaactcttgacctcaggtgatccacccgcctcggcctcccaaagtgctgggattacaggcatgagccaccatgtccgaccaccaatatcattttttaaaagtaaattattacgatttccttaggtggttaataaattaccattattttctctattttacagatcacgaaatgataagtaacttaccgaaagttacattatttaagttaatcaaatgtttattgattgccagacttttttctaggcttaagcaaatgttggaaaatacttctctgagctttcaaaaatgttatttctacttgtcagtgctgcaggagtttaatacagataatttaggctgggcgcagtgaatcacgcctgtaatcccagcactttgggaggccaaggcgggcagatcacgaggtcaggagatcaagaccatcctggctaacacggtgaaaccccgcctctactaaaaaatacaaaaaattagccaggcgtggtggcgggtgcctgtagtcccagctactcaggaggctgaggtaggagaatggcgtgaacccaaaaggcggagcttgcagtgagccaagattgtgccactgcactccagcctgggcgacagagcgagactctgtctcaaaaaaacagataatttatctacatactgtatgactttactttaaaaaatgtttgtatccttgtagtaagactgttattttttttaatcctacatcacatcatgcattcctgagtgtgagctaccagtgtttttgtctagggctagattactagagctaaaatatcgggagaattaatgagaaaaaaaggcttaaccactgaggctctgtcaatatcagtttttgtggcaggctatgtttactttcttcaaggaaaaatgtcaggcaaaattttatcactacaaatacaaaagagaagaacattaaaaaaatctgatcattatagaaatcatagtcagtgcagaatgtttcctgcagaatccaagtgtttagtgaatgttggtggaaaatatgaagtgtgtcatgtgattggaaagtcatttaccatattcatttttcttttaggaaaaaaagtaaattagattttgtatgagaataaaccttactgagacttgttaattttgctctgaaatttactgtttgatattaatctggccagtctagctttcttttagattaatgttaccatgatacttcgttttttatccttttacttttcatatatctgtgtctttaagtctaaaacgagtttcatatagacagtatcagtatgtagtctggtccttttttatctgctgtgacaatctttgccatttaattgcagtctttacaccatttatatgtaatggaattatcattaatttacatgggattataatttacatttaatgaccactatccttttatttgcattcagttcatcctcttgttccctttttccttctgttgggatgagtatttttaattacttcattttattatgtttggttgtattagtttctaatatgattagctgtattagtttctaaggctgccataacagattaacatagagtgtctcaaaacaacagaaatgtattcatacacagttctgaaagctagaagtccacaattaaggccttggcagggtcatgcttcctttgaaggctcttggcaagaatctttccttgcattttcctacgttgtgttagttgccgctaatcctctatgttcattggcttgtggctgcatctctccagtttccgcctctgtgttcacatggccatcttccctctgtgtgtgcctgccatttccaaatctttctttccttataaaaatagcaatcattggatttaggggctaccctaatccaatattggcctcatgttacttcattacatttgcaaagaccttatttccaaataacgtcacattcacgtagacctggagtaaaggcttcgagatattgttttggggaacacaatacgacccgcagcattagttttacctcttcgtgttttgttttgttttgtttgtggttgatctagggcttgtaatgtaaatctttaatcaatcagtctactttccaacaatattataccacatcacatatggtgtaagaaccttacaacagtttacttgtatttcccctcattttgccaagcataaaatactattgctttaagctactgtagcatctcccatatctgtcccctcctctgtattcctactactactgactaaggtgagctccttgttatttcttgccttttgtcttgagtagtctggagtttcaccagtttaccttagcgatcttgcccttacctatctaccttcctttctcacttaggtatcgtgtttatgtctccagatatgcctgtgtatgttacatctctgtactttgctcacactgaacttgaacaccctcccctccacttatctttcaaacagttatttccctttcaaaaccaagacaagtcttgccttctttgaatcactcaatgcagtcagctgtggtctccctctgtgccctgctatggatgacacacaatctcagtcccaatcccaggtcctgttacgttttactggataatttgtctatcctcttcctcccaaggggataggaaccttgtgagagtcatctcctagcatctaggatgtcaccagactgataatcactgttccatgaatgtacactaaatgaagttatcaatgaatcagtaagttgagtgctggtttcactagtccttactgtttactgagagttgtttataaatgactaaatgttcccttggtaggtgttgtgatgaatcctacctaccctgggtaagttccttgactattcattgttaacttcatcgaaagttacttgagaatcaagagtcattttgacagcttcaaatattgacagaaggctgtggacatattttccagatgccttaaaaaaataggatgatttcctcattgaagtagaaaataacccttgataccaccagttcaactcaaatatttacttgggcaaataattatttgcaagcaaagaaaccatcttacggctttttattctgacacattaaagcacttaccatgagaaaaccatacaaacatcttttagataattttgaccagaaacattggaaggacattcatgacatatcctggctgcttagaggtttgcaaaacatgctgctccactctttttttcttaggcctgtacacagatcccaagtcattttttaaatgtggaaatgtttaaagggttgtagtgttttctgattacagaaaccatacgaattgtagctgtaattgtggggctagagcctgagggagcttttcgctgattcttgttcggggggatttccttgaagtcgacagtggaagaacattataaagcaaaaactacagctccttacacttctccttagctgtgaaaataaagaccaaaaaatttactgagatgatggtgaaggccaccaaacctcacagggctgagtcagctggtgcctatgagggcgcccctccttgacacttccttccttttggcaggaaggagaggggcagaaagtcatctcctgccgcctccctcccctcagaaaatgatttataatgtttgagagatctactgtgagcaaagttcaacacacatgcctaaaggacacgtcctctaacaaatgaggacttagcaagctgcctaccaggcaccaagctgtgtgtaccacacaggtatttctcacttaatctttacaacaacccattaagataggtgatctggtgtcctgagtggtggccctctctcatgcatatctgtatcccaatccctggaacctgtaaatattgccttatttggaaaaaaagggtcttgaggtgaccctatcctggactatctgcatgggccctaaatgccatctcatggactttcgaaaaggtgaggttgagatgggagtgatgctgacaaggcagggcggctggaggaggtgggagctggattccctcctagcgcctaccgaatacgtttcggcaagtttttttttttttgaagcaggctctctctctgttgcccaggctggagtgtagtggcgcaatcacagctcagtcactgcagcctccgcctcccgggctcaagcaatcttcctgcctcagcctcctgagtagctgggaccacaagtgcactaccacacccagctaatttttgtattttttggtagagatggggttttgccatgttgacaggctggtttcaaactcctgggctcaagtgacccgcctgtcttgacctcccagagtgctgggattacaggcatgagccaccgtgccgggccactttctgtaattttaagctaccaagtttatggcagttttttttttttttttttacaataaccacaggaagtccatgcaggtgccattattgcctcattttacagagggggaaactgaggcttagagagatggattaaggtgctcaagtttgtaaattgggtgtgggtggagctcggatgcatgctcagtccttcgtccagagcctgggctctcaacttctttccagtgaggaaatgcaaatttgcttctgtgactgataacagggtgggtggataccagccagggtctggtgtagctcagcaggttgctcccttctgccatgcaataataagaatcacctgtggcccaggcctctctaaagagattgaagtcttagaggaggttggtacctctccaggccacgggacgggaatgacagtgcatttgcctgtgtcgtagccacctgcttttaatcagcactttaaagggggcagaaaccacagatttcacataaattgatattgagcagttgtgtgaattccatttggacctcctctggtggtggttctaacccaaattatttaaagtatttggtaggaacacaagccacttgctgatgagagagaggagtaaaaaaagacactgatttttccattctagaaattttatttcttaaagcaagaaatccttaattgcctcctatgttgctgttcttatttgcccctttttagtggtcagtggggtgtgtttcttaattgtgatggcacagaattcaccttggtcccaaacaagaagtgaagggggttaagaaatctaaaaggaatgaagtttatggaaatgtgagtcacctctcgtcacacaccactacctcctcccccagtcaaggaattcctctgaaattccctgcatgtttctctttagactcttaagacccctgggtacttgcatctccatttagaacaacttgagagaatccctggcctgttgtatttcatatacttcccagtgtctcacacacacgcagacttgcttttctgacacgtgcagagttttactcttttttctcgggtgaagagacgtaaccatgatggaaaatgagatcccaagactaaaaccagttagatgatgttcatctgcttctaagccagcattctctcacaaaggcttccctttgaggtcttcctgggtgtaggtccttggggaaaacgtgccaagtttctgcacagactgtcccttgtctcttgacaattgaaagttccacggcaggttaaagaaggctctgggtccgggtgcagtggtccatgtctgtaatcccaacactttgggaggccgaggcaggtagatcacctgagttcaggagctcaagaccagcctggccaacatagtgaaaccatgtctactaaaaatacaaaaattagctgggtgtggtggcggacatctgtagtctcagctactcgggaggctgaggcaggagaatggcttgaacccgggaggcagaggtagcagtgaaccgagatcgtgccactgcactccagcctgggtgacagagtgagactctgtctcaaaatcaatcaatcaatcaataaggctctgggaatagaaatgggaaagattctccagtgcgggcaaaggaaagcacagtcctgattaaagcttcctgccagcattaaatgtccgttcattcactgcctcctccatggtgcgatgcgggtggaaaggaagcgacacattcgtctttcttgcaaagagcttgcaatgctgtattctgttgagcatgtaagagtggggagctgtgtgtgttttatgaaaatgtcttttgttaccaagcatagctcttattaaacggcttcttttcttttaaagcctatataacatgagttacatgggcgtttacatcaattttgtgttggtatatagtaaattaccccaaaacacagtggcttaaaacaattgatgtttattatttcacagcatcttttttaattgttgttttttgagacaaggtctcactctgtcacccaggctggagtgcagtggcacagtcatgactcactgtagccttgatctcctggcctcaagtgatcctcccaccttagccctgtgagtagctgggaccacaggcatgcactgccacacctggctaattttttatacttttccgtagagacagggttttgccatgttgccttggcttcatagcatctttgggtcagaaattggtacccagctgagcaaggtgtctgcctcagggactcacataaggctgcaatcaaggtatgggctggggctgcggccatctcaagacttgagtaggggaggacccatttccaagcctgcttttcgcagggtttagttccttgcaagctgttggcggaagcctgccttgattctcgccatagggcagctcgcagcatggtagctggcttccatcagagtgagtaagagagggcgagccagacgaaatcagtcttataacctaatccaggagtgacaccccatcacttttgctatattccatatacttgaagtgagtcactaggtccagcccatactcaagggggggatattgtttgaacacttaagtaccaggacaggggacaggggcaaattagaggggaactcagaggctgcctaccatagcagaacagtaagtttcacttgaagcaaacatatttatgagaatcctaatttatatatatatatgagagagagaggggggaattatctttctcttctttcctttaatgaagtataattcacatattacaaaatgcatagatctgaagtgcatagtttaatgaattctgaaaaatgtgtaggattttgttattttataaaaccctgggccatgaggtttctttaaatgccaaatactatagatttatttacagtgtatatatttatgtacagtgtaaacaataggtgtatttggccaggcacaatgactcatgcccgtaatcccagcacttgtggaggccaaggtgggcagatcacttgagcccaggagtttgagaccagtctgggcaacatgacaaaatcccatctctaggaaaaaatacaaaattagctgggcatggtggtacatgcctatactcccaatgagtcgggaggttgaggcaggagaatcaacagagcctgggagttagagggtgcagtgagccatgattgcaccactgcactccagtctgggtaatagctaagaccctgtctccaaaacaaaacaaaaagatgtatttgttatgtattgcatataacaaatgtccctaaaatgtcgtggcttaaagcaacaccatttattttctcgcagtttctgtgggtcacagttcagctgcgtgcttgtgattgagggtttctcccgggctgcagcccagaagtctaatcatctgaggctcgactggggaaggatctgcttctaagcctgctcatgtgatggcaggattcagttcctcgttgacgttagactggacccttagttccttatggctgttggctggactttgccctcagttccttgccccatgggctccttgcttcctaaaagcacccaagccaagattgcactgtcaggagagaactaccagcaagatcgcagtcatggtcttttatactctaatcacataagtgacaacctgacattttcaccatagtctgttcatttgaagtgagccactaggtccagcccacactcaaggagagactacacaagggcatgagcaccaggaggcagggacgcactgagagccatgtcagatgccgcctcccgccatgtatgatgaaatacactatagacacaactgttttaagagcctaccagttttatgaacccaagtatgtctttttagtagaacatctaaatctagacagctagaagaactacattttataaaaatctgaatattttcttttttttttttgagacagagtctcactctgttgctggtgccagagtgcagtggtgtgatcttggctcactgcaacctctgccccctgggttcaagcgattcttctgcctcagcctcccaggtagctgggactacaggcttgtaccagcatgcctggctaatttttgcatttttagtagaggtggggttttgccgtgttgcccaggctggtctcaaactcctgagctcaagcgatccacccgcctcagcctcccaaagttctgggattatagcgtgagccaccctgcacctggcctgatgaatgatttttaaattgtgactcccctatgctcaaatgagattggatcaaatgtcttctctagcaaataaataattccatagctagaaagatctttggtaggtagtttccttcctcttgtgtgttccctgagctctcctactgacgttttggaatattttcacagattcttgaatactcctccctgccagaggtaaagagcttaactcttatcctcttaagtgtggactagatttcgcgacttgcttctaatggatagaatatggtagcagtgacagtgtgtgacttctgagaatagctgtaaaaggcatcgtagcttcctcattgctgtttttcttggatcacttgctctggggaagcccagcagccatgccgtgaggacactcaagcagcctttgaaggagctgctggtgaggaactgagtcttcctgctgacattgacatgagcgaagcatcttggaagtggatcctttcatttttcaggtaccgtgccagggcctgtgagggaaccaagacgtgtaagacatggcctctcattagtgtttaagcagtagagaaagctggtgccatctcattgttcaggagatgaagtgtgtggccggggtgatccagagagtctccttgaaagtacagtgttgaaccttggactttggggtagaattcagacagggtgatggacagctaaagtggttcagaggctggggtacagcatgaggttattaaaatgatggggctgagaagtacaagacctgtaagtgaagaactgggcaccagacattggcatgaagagaaagaagacacctgtgttcagaagtgagcctgccagggcagagttaagactttttgctggccaggtatggtggctcacgcctgtcatcccaacactttgggaggccaaggtgggagaattgctctagaccagcttgggcaacatcgtgtgaccccgtctctatgaaaaaaaaaaaaaacgagagaaaaaaagttatttctcaaaaaatagccttggacttgttcaaatttggatcaggtgtgaacttgtcccagtggagccatggagcccaggctgtgtgtcagaaagcctgcaataggcttccttgacccagaagatttttagagcctccattaccaatcacgctatgacacgtttcttgttcccattggggcctgtgtttcaaactttgggctggaagagaacattcccgtgactactcacatcatttctattacctacagctcttctcccctgtattgctagtctgcctctaccttttgagatcctactcactctccgaaggtaaggtgggtgacctgttaattttaaaggacttttttttggtggggggcactagcaaataaattaaatctatggatgtgaagggagtttggttatgacatccactgccccattaacagccttgtccttcctcttggcttcccaagctgtgtgttctgttgaagaggaggcctctccttgccccaggaatggatcagccagttgggattatctgttgcctctaaacacttgtagtactgtgttgatgccatcccattgtacttgtgattccacgttgtcaccttaagtagattgtaaattcttttttttttttttttaaagacagggtctcactctgtcgcccaggctggagagcagtggcacgatctcagctcactgcaacctctgcctcaggttctggcaattctcctgcctcaacctcccgagtagctgagactacaggcgcacgctgccatgcccggccaagtttttgtattttagtagagatggggtttcaccctgttgcccaggctcgtctcgaactcctgagctcaggcaatccacctgcctcggcctcccaaagtggtgggattacaggcgtgagccaccacgcccagccagtagattgtaaattctttgaaggcaggtatcgtatctttctgtgcagtcagcacagcattttaaatgcaatgcttgcttatgaagggctgtttttctttctggattgttgcgtgtggcagatggagtgccacgcaaccagacttcttggctacaacacacatgtggcttcttttatggaagttgccacctgcagatccttcaccaccaagaacatgcttttctgtcatattgcagaatctttgtggaggatcctcgttcttccttaacttcctttgtgccacacgcttccccacttcacttgggcacctttgaacagagaagcaggattgctgcctccccaccagtgtaataaatgctctttacaaatgtccctccttggaagtatatcttgtagaaatcctagtttctaacttcatccaagaaatttctagacaacttgtagcctagattatcctttaagagccacttacactactggaaaacaactccacccaggttcttatttgagttacagggacaagaagcctttggattgcaggtttaaaaaaaaattttttttttattgctgagacttctattatgaactaccacagttgacaaactgttagtttccatagcaattttagactgtccttaggtgaagggtttcccttccagttgctatttaagatgtgtggaatccaagaagtcacaaaaggtatttcatgtgtcataccttggcaatgcgtgctactaattatttttttgttcctgtcgttaaatatagagccttctcatttattttgtcaaatgcattttcctctactacttttttttttctttttaaagaaagatgctctgtgaaaaggaagccattcatccatccaggtgagctctggatgggcgagccagccatggggactcctccctgggactggagctctttttgactgagctgcacctttgagcatcgagtttctgtttaccacctggatgctttccattttgaacacatttgggcctttcactgaaaggcactttaaaaattcaaggttttagcatcatcaccaaaaacatctactaaaatatgcatttgtacctggagtcatttaaaacaaatgagttaacctcctgtgctctgagaataatcttttctttcttcttcttttttttttttttttttggtcaagacaatagtcttcatgggcattaggtgacaacagctatgcaatttcattttagtccataatacattatttaaagaggttattgaaaatgttgattcctggagctaaagaaatggaaatatttaaccaaaagaagagaacatttgaagacctcaaagctttcatgagatgtttgaaaggcagttgaatgtggagagggtatgctatctgctatggtctggctctgtttccccacccaaatctcaccttgatttgtatcaagagcaagaacagttggagacaactaaatcatggggggcagtgtttttcccatgctgttctcatgatagtgagttctcagagatctgacagttttataaggggcttccccctttgctcagctctcattcttctctctcctgccgccttgtgaaggacatgtttgcatccccttccaccatgattttaagtttcctgaggcctccccaggcctgtggatctgtgagtcaattaaatctctttcccttataaattaccccatctcgggtatgtccttataacagcatgagaatggactaatacactactacctgatactccccggggaagaaccccacagcatcaggataggggataaggaaagcaatttgggtcaatggaggagcaaatttgccagcagtttggagctgttgatagttggattagatggtttcatgaagttttgagcctctagattcagagaccaagtgaccaccttccccttgcgctgagagggaatttcttcaactggttggaaatggaatgataggtaggatccagaagggctatctaacttgataatttatgtgattgttttctcatttaagggagagaatattatctacagtgtttctgatttttttaagggccttggggaaggacataatgaattattcagagacttctctctgtgaagcaagttgcacagagacagacaacttgatacaaattacgattctaaatttgttagtaatatattttattcatgcactctacttacaatagatttcctgcttgacatttcttagacatatcactcatgatcccacagttgctctttgaatgggtgcgaaacctgtgcaaaaaaaaaaaaagatgtacacagtctaatgaattatgcaagtcttaaaatgtctcaagaaaaagattactcattaggattttcgaatgaataaattcaacataattgttggtgcaactgctctctcatgtaataggtaccaaaatctgattcatgttttatattggagggacgggtacttttctgaagaattttaataaaggcaaataaatgccttttctaggatgctttatagtagagcccacaaaggttttcttcagcaatactatcagtgctgcttttctctccatacttccaaaacctagaattttttgccagtactttttccctgttttcttctgagtggtaaaatccatctgggcagattttctacaggcctgtgagggggtgttagccagagagcagtgttttgagctcatatacagaataggtgcctctggatagaagttccgatcccagtatcctctcccaggccccagttctgcacaggcagaggacaccatccccatgcagtccagacacctgccagcaaatgtactcgtttgctgacatctagggagccttgtgatgcttctgaatactgcccaccgttcccaattgctgaaatgtttaagaactttatagctctagccaatacgggaatagctgtacattcaggaatgctcgtgaaatgtggcagggccttgccctcctaggcttgaggcccaggctcctgatggtcggtttgattggtggcttatccatgcacctgatagttatttatggctacgtgctaggtactgtgcagacaccgaagcataaacatttcccctcctggggcttctggtcttgttgaagagacggacagtcaacatgtatgccaataaatacattatttgtttaaagtcacagtaggtgctatgtaggcgaaaaacaaggagtactggtaaggaataggagaagagggctttgctgggatgggacctttagcagagacttgggggatgtgtgggatcagtgtagggagaggagaggggagcaagccagggagaaaggagcttggccgagggcctagagcacccggggcaaagggggacctggtgcaggctgaggcaggtgagctgagcagaggcagacagggcccagtgcagtgaggaatctgattctcatccagctgcaaaggtaagagttataaggttttaggctaagagtgagatcatcataaagatggccctgactactgcctaggaggagtggagagtaagggggggagggaggacagactgtaagtggaaaagagagaatgtgagaagagtagtggttggcaattgcagttgttttagtccaagatgatgatacccgcagctggggtggtggcagcgaaagcagccgacggtgaaggtctgcatggaggttcggccatggacctgaggggtaatctgccatgcagttcagaatgatgaccctcggaccgggcatgcttctcagttaacatctgatgctgccctactaaaggcaaaacggatggtctaatgcaggcaaactggaaatagtgctggtaagaactgagagcacctgtgcttgccatccccatgcattcgaacaggctgtggcttccctctgggctcaagtggaactgtttggacagtacacatttgaatctgtgacagctcttgcactggactgggaaagttttgggcaaaaggagtccttgaatcagagactcttaatgcagggacagaccttaaaagccctccaagccctccaggccgggcacggtggctcatgcctgtaatcctagcactttgggaggttgaggtggatgggtcacgaggtcaggagttcaagaccagcctggccaagatggtgaaaccctgtctctcctaaaaatacaaaaaaaaaatgagctgggcgtggtggtgggcgcctgtaatcccagctactcaggaggctgaggcagagaattgcttgaactcaggaggtggaggttgcagtgagccaagatcacgccactgcactccagcctgggcgcaacagagtgagtctctgtctcaccaaaaaaaaaaaaaaaaaaaaaaaaaaaagctctccagtaccctcatcttagagtttagggaactcaggctcagagaggtttgagttattcatacaaagacacgcagccggtgagtgacagagagaaactgtccaataaggcaaattttttttttaagaattttgaatgatggacttataagtcttcattaagtccttataggatctaatttttataaatcctttcagaactaatttatttaaggattaagccagtcaaaatcccagaacggtttcaagtcaacagcttaaaagtggaatctgaatgttaaccaagatgattttccttgtatgtggacggctgtaattgggccccagtctctcatgtgaaaagccaaacagattcagatctaatgagttctggccgctggggcagatggattttggaatttgctatttatagtgttttcaagtgtcaccttccccttttaataagcactgagctgtgatctggccccaggagcctggagcacattggtaggtgtgctgagggcctcacagccgaatgacttctggtccaggtttggaattgaaggtttaagttgggatgttggctattcctcagaagtgaggatgtgttcttccaaataaatggtgatcaatccctgtgcattggagagctgatgggggtgtgcttggcggagagaggcatacccccagaggcttgaggagggcagttgtatttcacgtgctgaggagagtagtggtgtggttaaatcaggaataaaaaaaaaatatgaagaaattgtcagggagagcttcagctgggcccaaaggaaatcaagaaaagagcaaatgagaatgcaatttaaaatgtaaatacaaactgaaatcaaagccatttctatgaaacatttaagaacattctgtaagtattgctggtcaggaaagcacaaaaaattgtctgtgttttgagcccattgtcagtgtattatttagagggaagttctgatttttgctaaggggttattccgagttgcgaagtggtgtggtgttgggggaagaataccaccaactccaggccagctgctgcatctcctggaatctctgttttctcttctgtaagatgggagtcagggtggcctccatctgatcacactgaattgttgagtgactcaaaggagataatgtaccaaacactttgtaagccctatgacaccgttcaaagtctatttcctcccagctctgttttctaaaatcaggctgtatgttcgaatcacctgaggaacttaagactattaccagcgccaccactggcatttttcattctcttggacagcagaggttttccaaagccctggatgtcattctgctgggcaagtctggctgacggggctctgaggagttggagggcctgtccacccttgcctttgggaaaccagccagccagtggtccaaggagattgtcggctgtcttcccaagtcagcgccatcttccttcctgctcatttcctgtctcccagtttttccctggaacctttccatttaaatatgaattcagctgcagcctgcggggatctgaagtactagcgagttgactgcctgaggaggtgggcctgtggagaaccagagctacagttttccacaaaacatatcattttaaatgattctgaagcctgttaaattacactgatgggattaatctgataaagtggtaacagggtagatgcaccgaaatgatcgctttcacatgctttttaattcagtcaaaattaatgaaagatcttgtgtttacggatggaactggagtttaaaattctgaattcattagcctgttttaatgcataaatctaacttccttgtccgtgtgtgaaactcaactagagtgcagctcgatgctactctgccaagagaacaggcagaaggaagccacattttacccttgaagccgggttagccccgtgccttgatcatgccactgagaatgtatgtttctagtctgaatccttttggctttatgttgtcattcagcgtgtgtcatgtccacacccagggataattcctgtcttagaaataaggtgtatgatccagcaattacacttctggatatagacccagaagagggtctcgaagagatacttgtatgcccatgttcgtagcagcagcaacattcacaatagataagaggtagaagcaacccaagtgcctattgaacagatgaatggataaacaaaatgtggtaactacatatgatagagtgttgttcagtcttcaagaagaaagaaatgctgacacctgctacagtgtggatgaaccctgaagactttctgctaaatgaaaaagccattcaaaaaaggacagatattaaacgattatatgaggtacttggaatagtcagaaatcatggcaagtataatgatggctgctagaggctacagggaaggaggaatgttaatgggtatagagtttcagttgtggaagatgaaagagttgttgaggtggatggtggtgatggttgcagaatagtgtgaatgtacttactgccatacaactgtacacttaaaaatggttaaagtggtcaatttaattatatatataattaaatatatataattaaattatatatataattaaatatatataattaaattatatatataattaaatatatataattaaattatatataaaattaaatatatataattaaattatatataattatatatatatatatctcaccacaataaaaaaaaaagtaaaacataacaaaagaatagaggtatctgtaggagctctctgccctaattcagatgagtaccaccctataaatgctggtgaagtctacaggatttttgccagcatggcaaccactgtgctgtccattcttggtcagacctgtagaagggaaacagcagttgtggaagtatgtctcaggcaccctggaggacacctaaggggaaactcatctgacaaggacacagacatttttctaggttccctgagtcttctgtgtggtccatcctaccagctggggttatctgatattccagtgtatgtgaaaataatagctaagttttgtttttttttgttgttgttgttgttgttttttggcagagtctcactgagtcacccaggctggagtgcactggcactatcttggctcactgcaacctccatctcctgggttcaagcgattcttctgcctcagccttctgagtagctgggattacaggtgcgcgccaccacgcccagctaatttttgtatttttagtagagacagggtttcaccatgttggccaggctagtctcaaactcctgacctcagattatctgcccacctcggcctcccgaagtgctgggattacaggcatgaacactgtgcctggccagcttgataaatttttatgcagaatggttttattttattattatttggaagggaatagtggcccttctctctgatttctggttatatacctataactgtagcagctatttcatcctgttagctttttttttaaaaagatattttttagagccattgttttagggttataggaaaatggagtggaaagtacagtgttcccttatacctgcccctctcctcaacagtctcccctcttattaacatcttgcattaattagtgtggtacatttcttacaactgatgcaatattattaacaaaagtccatggtctacattagggttcggtcttggtagtgtatagtctgtgggtttggacaaatgtgtcatggcccgtatccacctttatagtatcatacagaggatcttcactgccctaaaaatcctctgtgctccatcttgttcttccctccctcccatcagcccctgatccttctattgcctccatagtttttccttttctggaatgtcatatagttgaagtcatgcagtatgtagcctgttcagattggcttctttcacttagtaatatgcactttagtttcctccatgccttttcttgacttgatagttcatttctttttagtgctaaatcatattccatcatctgggtataccatggtttatccattcacctattcaagggtatcttggttgcttccaagtcctgtgctcttttaagatttcagtttttgacccttgatgtgacaagatgggaagggccacaaaatatctcattctttttctcctgttgacttagtctgaatactccagactgtgctgacctgtgtggttcagtctaggagccataggctctgtgaggctgttgaacagttgaaatgcggctggtccaaatggagatgtttgtactgtctgtgcagaggtacgttggatttcagacttagtataaacaaaagagtttaaagtatcattaatttcttacatcagttatgtatagaaatgataatttatatcttggattatataaaacatttaaaaattgttgtacttgtttcttctttccttccttccttccttccttccttccttccttccttccttccttccttccttcctcctttctttctctctctctttctttcttcctctcttccttcctttcttccttttcttcctttcttccttctttctttctctttctttctttcgagacagagtctcgctctgttgcccaggttggagtgcagtggggccatctcggctctgtgcaggctctgcctcccgggttcaagggattctcctgcctcagcctcccgagtagctagaattacatttgcccaccactacacctggctaatttctgtatttttagtaaagatgaggtttcaccatgttggtcaggctggtctcaaactcctgacctcaggtgatccacctgcctcgaactcccagagtgctgggattataggtatgagccactgtgcccagcctctttttaattgtttaatgagactactagaaaactgtaaattacctacagctcacataatgtttctgttgggtggtgcttctgggaaaaagaggaatgcgtggcttttgtccatggtgcctctttaaggatgttattcagctgatgtttctcaggtacctgctatgtgccaagcactgttgaagcacttcagataattcagtgattgaaagaaacaaaacccatgactttgtgggttttagtacattagatttggatattatcaaattattttggcactttttctccacagtagcactactgtttttaaaagaccagtgccagccgggtgcagtggctcatgcctgtaatcccagcattttgggaggctgaggtgggtggatcacgaggtcgggagttcaagaccagcctggccaagatggtgaaaccccatctctactaaaaatacaaaaattagccggacgcagtggcaggcacctgtagtcccagctactcaggaggctgaggcaggagaatcgcttgaacccggttggcagaggttgcactgagccaagatcacgccactgcactccagcctgggtgatagagtaagactccgtgtcaaaacaacaatcaccaccaccaccaccacaacaagaaacacacaccagtggcccaggaaagacaaaggaggctttaggatatgtcccggttctcattctggtcccaacacttattatggatgtaacttttggcagttccttacccgttaagccttggtttcctaaccgtaaaatgggactaagtaattcctctcatagagtgctgcttgtgcaacatggggtcagaatgagtactcaggaagtgattcccactcagcccgcatcccttcctggagcactgcagttttgggattcttgtctccagcccagctcttacagcccctgagagcatgctgagcaggggaaagctgctctaaagttcaatttgcattgtaccttctccatttacatttcttgaccttttgctttctcatccagcaatccccagcagggtgtctgtgttctaaggcacccacctagcctctttctgaattttaatcccagctctggctaaaagcctgaaagcaaaatatgaatcgtagctccacaattataacgtgggactttctttataaaatgaagttgctctagcagaaagccagggctacaaatcagtagcggcttcaggatgcatggcctctttctggcataggaggcccctttttcttctcagtcgcggtgtttcttccaacatctatgcatgttgaagtctggagaaggctgatgctgagagatatgtactaatgaaatgcacaggtgttatctttttctgttccaagtccctgtgtgccctcctgtcttggtgggtggcatggcaggacatagaaacacttggaacctgtttactattttccaaaaaggccttgcctgtagcccattgatctacccactatgtatattcattttaatgctgtttttgagtccgttgactaccccgggaaatcaaagttgactaccacagccctagtcctcaagtgtcttgcctgcaatgaggttacctggcctattagaattaaggactaaaatgcaggagctggggtcacacctgccagctgtttgtgagccctgaagatgttggggatttaaattttagatagatcattgtagctgcaaggggtaggacggataggtggggtatccagagtccttggataccttgtcttcctggaccctctctcagcacccttgggctaagatgcactcttgaacacatttcctctatggcccctttcagatctgctgatgatacctggattccttctttcagagtgacccagccccatcccagggaacgggcagatgggctctgttgcccatctcaaagttcccttactttttttcttttgaggttttatcagtccagaagtggaaagaagatggatgccattagctttagaaatattttttatgttttagggagaaagaagcagagaatatacttttagatgagcacactttaaaataccagtaagacagacttgttggaagacaggcattgtgaagaactgttgttgttttttggttttttttttttttttttttttgcaacagctttccccactttgggaaatgagaacttatgccctcctgaatgttgtatttgatgggacttagatccatgggggaattttattttattttttaggaaaaggtaacctactaagtatagttatatccttctagcatgaaatataatcatttattagaccagaactgtttgttaattcagcagtgtgtcttgaaaaagagccaccctcaaatttaaagtagaaatagattcttcattctacacctttttgacatcagatttgctttcctggtctcagtgcaggtgcccctactgtttggtgtttgggacacagcctccgagtaagtccaaggagagcttggggttaggcagtataggccatgagccccttgccagcctcccagggactttgagaggagctgtttggggcaagatgcttaatgaaaggatgttttgtaatttagagagaaaaaagaaatttatcccatagataactaaaccctcaatgggaatattagaaaatacaattgtcacattatgtaatatttgtacattttccactgcaagtaagaatgcgtcctttccttaattttaaaatatggaaaaggtcgacctttctgctaccgtaaggaaaatcaagggaaagggaggttttatacatgatatggggaacttggtataattatttagctcagtatgaaattctgccacaggaatataaggtaattaatttctctaagtatgaaatgcaatcttgaaaaactaggaaacaggtgccgaggtgacaagataggaagagaagctgagtgttgtgcagtggcaccgaacaacttctggaacattccagagcgtggctttgtagctggagagagcctcctggcttctgtgtggcgaccgagactgacccctgctggcagattgttgctaagccgtggctgttaatgaagcagggcaataaggcccttaagcaggagatcctgccaggccacaggcaggtctgtctccgaggctatgccttgtaccagcccttgatgctgttgcctgaattcccagtgggaagaaaaatggacccagcagtttttagtgttttggtctcagtttccaccatctctcccctttcccagtctgggatgtcagtgtttgctctctcctccctaccctctgttacctcaagatttcatggaaataaaaagccctgctaacatcacaaagaggctgaaaattccagatccacctcggagccagacacttgagaaatttgatgccaaggtaacctgcgtttgggaaaacatccttattaggtttatttaagaacgatttgaaaaattcctataagtgaaaatcagatgggaagaagtccaaaaatctgattcatgccatgactgtgatacaaccaagatcttcgtgagccagtggatggggaagagagataatgtacaatatttctatgtgtttcctggaaaaattcttaaacggattataaaaagcactaagtgtaaaggaaaatgttaatacattggactgcattaaataatagaccagcagaggtctggcgtggtgactcatgcctgtaatcccagaactttgggaggctgaggcaggcagatcacttgaggtcagtagttcgagactggcctggccaacacgatgaaaccccatctctagtaaaattataaaattagctgggcatggtggcacacacctgtaatcccagctgctagggaggctgaagcatgagaatcacttgaaccccaaaggcagaggttgcagtgagctgagatggcaccactgcactccagcctagacgacagaataagactctgtctcaaaaaacccccaaaaaatagatgtgcagagtctttatttgtggtagaggttagtgttttccccactacattttccaccagcttgttctgggagctgcttttgggtgctggtgaggagtaattcgtggtttaggaagcttgagtgcgggtgctgggtcctctgcttgttgctcagcagggtactggaggccaggaaggctggcgctgcagaaatctgtcttcagtgcacttactgctgttgccatggacagctcattcgtatagctggtgtggagctaatgaagtagggatgtttttaaaatgaaattttaaaaatggggtttgagaagtacataaacagttcattgtggcataaaatgacattataatcatttaattttgagatgatttaaaaatcatttcctcatgttccatgttctacagcttaccagtcaggaaaaaggataattttgtgggactcaatgaagtgatgaaattgagaacaaagcctttcatctttggacttacacttccatgttcctaaaagagttaggcagggatatgtaggtaaatcaaagactggaaacgtagggtctttggaaacttttttctgggtcatctttttagtcttaaagctaagccttcagttgccaagcagtggtttttttaatgaatgaggctggtcaataggatatctatattttaaaaacctcaaccacaagtaacaccctacacaaaaaccaattacagatagatagtagacctaattgtaaaacaataaatgttctagaaaatgacagagaacatgtttatgaagttgaggtacaaaataattttgtaaacaggatctaaatagaactaaccctaaaggaaaagattaatcaggcatttttgttaattgaaacatcaaagaatgaaaggtagactggtattgggggaagatatttgctacacttatacctgttaaagggcttgtgtcctgaatttaaaaaaaaggtcaggtgcggtggctcacacctgtaatcccagcactttgaggccgaggcaggcggggatcgcctgaggtcaggcgttcaagaccagcctggccaacatggtgaaactctgtctctactaaaaatacaaaaattagccaggcatggtggcaggcacctgtaatcccagctacctgggaggctgagacaggagaatcgcttgaacccaggaggtggaggttgcagtgagctgagaccatgccactgcactccagcctgagcaagaagagtgaaactccatctcaaaaaaaaagaaaacctcctcctacagatcagtaagaaagacaatccagtagaaaaatggggaggagatttgtaaacttcatgaaagaggatataaaaatggacaataaacataaagtgttcaacctgggtcatcaggggaatgcaaattaaaactgcaatgggatgtcaccagcagtcgtaagaaagaataaaatgaaaaagaccacagtactaagtgttggtgaggacatgctcctggtatgcaaattgctataaccactttagaaaactgtcagtattgactaaagctgaatacacactcctgtcagacagcaattcttctcgtaggtggatccccaaaagaaacatgcatgtgtaccccaaaagtcatgcccaaaatgttcacagaagtattattcataattgccttaacctggaaacaactcagatgttcctcacatgtagaatggatttttttgtataatcctatcatggggtactgtgcagccctgaatgaaaaacctgttatgtgcaacaaaagtgtgatgtcttgcagacataacactgagagaaagaacccaggcacagaattgttttctgtatataaaactcaaaaagaggcaacactcatctctagtgcctaggggtcaaggtaaccacatcttgctggggagaagagtgactagaacaggcacaaggggacttctggggctctcgttccattctgacgatggacgggtttgtggatacacaggcgagattatgttgtgagaatccatcaggctgcatattatgacttgtgcatgtaaaacatgtatgctacacctattaaaacgtgtttgttttagaaatgccttcagtatgtacagctatgatagatcaacagaaaaaataaaacactttaaaatttctttaaaaatttttaaaaagcagtgccttcaaacacccaggctattgtgcagcgtgttgctactgtctgtgatgcctgcgaggcatgggtgagaggaggaggcggtgccagtgagtagagtgagatcgtgatattgctaaatcactttcttagggtgtgaaagactctgctttagctctttttcgggcttttctgccatgccttactagttttggcagttttcctattaaaattatatgtaatgtcttgatataactgtgctcgtctggagctgtgtatttaaatagctgtaaacttctcaacccaaattgtgggaattaaatttccattagcagattggcagcataatctggtgggatgttctctgggcccaaagccaagagccctgggttctagttacagcttctagtcctgacctggagcatgtcactcagccatcctccgtgggtacctcctcctgaaaataatattaaatctacatatggaaatcacatccacccacctctaaggttgctgtgaaggtaagggaaggtaatatctgtgagcactgtttgcaaattgcaactgcagagtcataaatctgtttgcataaaccacacattccagaggggttctaatcgtgtttacatatacttcttaaatttcgtactaaatgtctgtagatatgaagatgtgaaaacaaaagctcagtgagaaagtaaccaacagaatggaggaattctggagaagtcctaacatgtagtgttttcccattcctaatccctatcatcttgtggcattgcgtgtacttatttctgtgttttcacattattaactgaccattttggatggttgaatatacaggagaggtgctggttcaggaaataattgtttttttttaatccatatttcaaaagtaattcttgtcggtatatacaaatatgtttaagttttattatttgccttttaacaaattacaacatgccacattaggaataagtttgacacaccttaatcattttaagtcttattatcactaaaatttgcagcattctccttcatggaagaaaaagttaatttggtggaacctttagtcaaattaattggtcagaagaaatactgtatacttaactgaaagagggaaaaaaaacccatgttttaatgaacttaaatttaattgaacaaccttcctcaatcaatgttttagaaattgtttttctcaggaaacaaactattgacctaggcaagtggtttaaaaacttttgtttgacggtagacatatacttttgcaaataaaaccttccacggaacctgagtccgtagagcagataaaagaccactctgaagcaggggtaggagtggagaaggtagaaaaatgggtggtagatcttaccactgagtgttttgcttttgaaatacgaagcctgttggatgccatggaaagccagataactattactctgtatgatagtgcagggaacgttctgtgtgtggttgtgttatgttgacattccatccagtgtgccactccgtataattccgtctgacgtgccactccatataattgggatgctgtctgttcacttagctgatagaggtgggattcagagactgtggtgtctgtgatgctgtgatcctagacatggtaagtgcgtaatacctctagatgctgatagattaagctatgattgaatttatagtttccagaatgaatattgtactttgagaggctataaagaatatcaggctgggcatggtggcgcacgcctgtaatcccagcactttgggagacagaggtgggcggatcacctgaggtcaggagttcgagaccagcctgcccaacatggcaaaaccccatctctactaaaagtacaaaaattagccaggcgtggtggtgggcacctgtaatcccagctactcaggaggctgaggcaggagaatagcttgaacccgggagcaagaggttacagtgaaccaagattgcaccatgacactccagtctgggccacagagcaaggctccatctcagggggaggaaaaaaaaaagaatatcagtaactgagaaaatacgcaagatgaaccacctttccagaaatgttccagttagtcaaattatcctggtaacccacagctcactgcagccttaatctcctgggctcaaaagatcctcccacctcagcctcccaactaactgggaccataggtgcacaacaccatgcctggctttttgatttttttgtagagatgggctcttgccacattacccaggctggtctcaaacttctgggctcaagcagtcctcctgccttggcctcctaaagtcctgggtcatgagccaccccacctggccctgaggcttttctgactaaaatattttaaaatgttatatatttttaaaactagtttttgctatagtatgagatgaatatctgtccccttttgagtaaatttcaattaaaaaatacagagtcctgtaattcagtgataagggagctggggaggcccttactttcaaacctgaagaattacatctgcttcccaagaactgctttcttgggaacttttaaaagtatgtatttgtttttgtgagtttgtaagagctgcgttctgtctacagaggaacttgttaatgaatccctcctcttatgatattttatatagaaatgcttggtttgtgggttgcgcccatgacatacactctgggaaataagaaaattatagacaaaccaaaatagaaagcagctcctctctcaaggtgagttcagcagttgtcagtggataaaaggaccttgtaatgagcagctaagcccacactcctgaaatgccttttcattgcaagagtgaaaacgagagataaaggaggttttttcctgagtaattctagcttgcctagcacgctatgagcaacagatagaggccaactttaaaatctccatgactgaattataccaccaaaacttgtgatcagttcgttttctgctgaaatcaggaatacatgggtcattaatatcaagtagaatagaaaagagaaaagcagtacctaaacgcaaccatcttttttatcctcagttggaaaagtgtctgttttcttctaattataaagatgctgcatgctcattacaggaagttctaagagtatcaaaaagtgtgaagaattaaagattaaccaaaattctgggaaaagattgttataacaatgttgacaggcatttacaacaaagcataacattattctttgacattatgctttgttgttgtttttaacaagctatatctagcttcctattattttcattttgaagtgcgacattcacccatcagaatatacactgaattcataaaaatattccatgtttcaaaagatgaaatacaacctttaaataaacacctagaaaaatggcctccctgggcacaggggtgcatgcctgtagtcccagctcctcgggaggctgagactggaggatcacttgaggccaaagagtttgaaaccagcctgggtttaacacagacccccatctctaaaaaatgaatttattttaaaattttttatatggcccgaagggtattaaagacaacaatgtaaaacaagatcctgcttattaagttaatgaaatcacaacacccagggttgacaagggagccaaaaatggcagtctttttctgtcttatggcctatacgttgatatggtatatttggaaatgaatttggtgatatgtatcaataagctttactgtttataatcttgatctgagaacttcatttttatatttatttgcctaaagaaagactatatttataagggtgtttgtgttgaaatggtcattccagtggaaatggcctacatggaatgggctgtacctcagctggacttcaattcaaatggctgtctgccagctccgagccttggacaagtcacttaacctctaaccctcagtcagtctctatatttttaaatggggacgacaataatccctgtctcagagtgtttttatgaagattacaatgtaatttaatatgcaaagcacttagaaccctgtctagcacggagaaacagcgcagttgtcaccccttctctgcaggggatacattccagggacccccgtggaagcctaaaactccaatagtgtcaactctgtataagcaggttgattatccctaatctgaaaatttgaaatgttctaaaaaccaaaactcagcggtgaaaggaaatccccactggagcatttcggattttcagattgaggcatttaaccagttagcatgaaacagatattccaaaatcaaaaaaaaaaaaaaaatcctaaattccaagcacttctggtcccaagcattttggctaagggatacccaacctgtactatgtttcttatgcattaatatgtctgatccatttataaattaggcacagtaagagattaacaacaataataaaatagaacaattctaacaatatactgtagtaaaagttatgtgaatggggtctctccctctctgaaaatatcatactgttgatgttagcaatctgggcatatgaaatttcacttatcgggaattttcaccttttcacttaaagtaatttccagcttctctttgacatatctgaattgccggtgtcaccactctggtactttagggccattatgaagtaaaataaggattccttcagttcaagccctgtgatacctcaacagtttatctataaccgatggctacgaagagactaagaggcggtagcagcatctacagaaggggtctgctggacaaagggatgattcgcatcccagatgatatagtgggatggtatgagatttcatcacactattcaggattgtgtgtaatttaaaacttacaaattgggccaggtgtggtagctcatgcctgtgatcccagcattttgggaggccgcggtgggcggatcacctgaggtcaagagttctagaccagcatggccaacatgggtgaaaccccatctctactaaaaatacaaaaattagctgagcatggtggcgcacacctgtaatcccagctactcgggaggctgaggcaggagaatcacttgaacccgggaggcggaggttgcagtgagccgagatcgcatccttgcactccagcctgggtgacaagagcgaaactgtcttaaaaaaataaagttgtttatttctggaattttccttttaatatattcagactgaggctgaccacaggtaattgaaactggaaaacaaaaccacacatacagggattacttggaaacattgcctgttaccaccttatgcattggtgtgaggcttgaatggagtaacacctgagggcagtgtctggatagagtaaaccagcattccatgttagatgatattcttagtgttagtattagtacataaaacttagaaacaggaccgggcacgtggctcatgcctgtaatcccagcactttgggaggccaaggtgggtggatcatgaggtcaggagtttgagaccagcctaaccaacatggtgaaaccccatctctactaaaaatacaaaaattagccaggtgtggtgatgcatgcctgtaatcccagctactccggaggctgaggcaggagaagtgcttgaacctgggaggtggaggttgcagtgagccgagattgtgccactgcactccagcctgggcgacacacccagactccatctcaaacaaaaacttagaaacaaatattcatctaataactggaggaaaagcaaaataaatttcagatggaggctgtgctatgaagactgtcacagttggttacaacacagtgttcattgtaaggataccaaatttcatgtgcgcggttgctctaccaaaggatatgtgcatgggaagatgaagtaaaaggagatgtattccacaggtatagtaccagcttccatggtgcctggcaaagcataaagaagcttgggttttggcctcttgaaattaatttaaagcatgagatgggcttaagcccatactatagagaccattaagatgcaggaagagcttgataattctggaccagtctataatttgaaataaatgtattttgaagggccaaagccagtggctctttactgcagcatgtaatttgattcctattggtttttgcaaggtgcttgaggacttttttcatgctgaaatttcatttctgctgttcgcaggacaagagaaatttgatacccatgtacgacttgaccaggcttgaaatttcactttatttgatggttcggctagtcatatataaattagtgggttcaggcttcagtagggaacacacacagagccagcagctgtggcctgttcctgtctcctgagtgaggagcattcacgatgttcttttcacttagagagggcttagggaagatttatgtgttcgctgtctctcatttctgttctcaaacccttgttttctccgtggaaaatggtgatgtactttttttttttttttttttgagacagggtcttgctctttaacccaggctggagtccagtggtgcgatcttggctcactgcagcctccacctcccgggctcaggtgatcctcccaccccagcctcccaagtagctggcactgcagacgatgcaccaccagctaagttttgtatttttggtagagacggggtttggccatgttgcccaggctggtcttgaacttctgggctgaagcgatctgcctgcctctgcctctcagagtgctgggattacaggtatgagccaccgtgcctggccctgtgatgcacttttaatcacagcggtatttggtcaaaggatggcagaataactaggcttgtgggctagggagcatccaggagggacacctggtcttccgtgagagtccggcgatggggatctttgcatccctctctcacattggtcaaggcctcatttctactcctgatgtctactcctgatttgggcctgagaggtgcgagctccctttccagagtagaataagcagatggtgattctgagcaatgtgggatgtggactgcagcctgggcaagggagtcccttgagatgagtcctccatagcagccaggatgccaccctgacttctggctctcctgactcagtccacttttagtctctttttctgcaggccatgaaatagctcagcccctggcctgcttcagacctagagctcagccagcctgcacttcggctctggttacgtcttggagatctgctctgtttctagcccagggaggtgcgtagtttatatggaagtgaactatatctttttaaaaatacatttccttcttttcttttttattgcgtccatgtatttagagctaaaggagaggtccacagcatgagtttatacttcaccttagccagaagtccctgccacatttatccttagatcagagaatgacactggagtgaggacggggtagtggggggtagggagtggggtgctgccctagcctgttcccagatgctgcataagtcatcgttttcaatcctgcatgcttagcttccgacccctgtcaccctgccaccccctcagaagctgccgcacacctgctctgtgccatggaccagccagagtgcagggtttgtgtcatgcgccccctccaccccgtgagctctttctttaacctttctcctgcaactcctcctcagccccctttgaaatgccaaattcagaagctgtgtttcccttcctcagccagctaacgagagactgaatttaaaacaaaacaaaacaaaacaaaacagccctcattgtctccctttgatatttgcctttcatctcgtctgtcccagggtcggggcatccacctaggccagcactctggaaagacgcctcacctgcagcaggtagagcccagcaagtcggtccaggcttccgcacatggtcatgtccccatgggtttgtccacatgggtttgtttgtccttggaaacccttcagctccagggagcctgaagtccttggcgaaggataaagtggaaggggaatgcagcatgagggagtctttctgttcatattcaccacctgaaaattacaatggttcaagcagtgcaccttctagacgaggtggtctcagcaagccttaaaaccatctggtcaacaagagcaaaacatgtataaggccatgaatgtacctggggctggtttggtttggtttgcacaaaccaccccctcctctgagtgatgtataaataagaaagtaaacccatctccctgccaagtcattctaaagaagtagccctgtcttggatgcccatgtttgtcttccacaccctttagtgtagaagacatcagggcccacctctgcatcctgggcctgtggttcctgtcctcttcatccagatctgtgactgtcgtgatagtgtcctaactgaccgcctgtctctctggtcttgtgcctcctcccagccgtcctcgggcccccttgcactgtggatcacgtccccatgccgacactcatctgtttcgacctgtgggtggctccccgcgcagctcgccaggcaggcctctgtgaactgactctgagagtgctctctggccccaccgttgcttctcacctctgcacttgcaagaggctacttgtgcttctgtgcaggctgtggcctcttggggctccctgcatctgtggtggctgctgctttctgctcggagcatgtgcacatgtgcgttccctagtcagtacacagtcagcccctgctgtggcgctggcacacagcagagagcaagagaagtggctttgccccccattgaacagacagagtagtagggaagacagacatcaagctagtcatcacgaccataattacgtaattaccctttgtgacaagagctgtgaagtggcaggaaggaagcagaccagggtcaaggatggccttcctgtggtgtgatgtgtaagctggaatttgggtaggaaataggtggagaaagagcctgaagaaagatgtttccggaacctgtgatcaagatgtgtgaaagtcgtgatgggaaaatgaggatgacggtagcagtgggtaggggtcagaggtcacgcttaccaagggtttaccgtgtcaggcacgggtctgtgttacctcatcacgtcctcatacgacactgcaagaaaggtgcttttaccatccccactgcacacatgtgaaaactgaggcacagagaggccagtgggcatgcctgagctcacgtggctggtagggtggtgggatttggacccaggtagtctgggtcccgggatcaagctgcagtcactgcagcatcttgctgggaccttgaaagaggcctttgtgactggaactgaaaccagggagctaaggctggaaggcagaggcagggccatggagatggtttaggaagtgagtgatgaaatttggatttttatgtgatcagacttggttgggaggacagtggattgaaggagaggcaagggaaggaggcagagagaggaattatacaccgaaggttaaaaaaaaaatcgggggttggacttccctccttctttcacttggtgctttctccttgcccttcaagacctggtgcaggtgtcactctctctcctcggctcactctctttctctgcgccggagatcctcaagatcaggggagatgtctcggcatctctcagggttcctcatgcacaggcggctttccacaaataaatgaaaggaatggagggaaaatagttacaaagctaagaagcaagatgtttcattgggtaatttaacttttcaagttcataactctgatgtgactttcacagtgtaagctgcctgtggctgatactttactcatggagtactagtggtctgttattcaagctaaaatttccatttccttattagcctgagtgaccagcattactcccctagctccacattcttagggagtcaagaggtcgctttcagcaggccaatctgtgcacgacctgctggtgctgcagcattccttactcagatctcagagaccctgggattttgcagtgctttggaaagctgacagggctggcactgggggctggctgggatgggaacaggctgcccctcttggctctccatataggcctgagagccacgtggtcccacatgagacactgagccatgtttgggctccgcctccagggttccacgcattcttagcatctcagcaatccaaggacaaacacatcagcttccccgtagctaaacataagaaagttgtccgtgtttttatataaactttactgacatttaaacatgcatacttcatgaaaagtgcaatattgtcagtgtgcggtaaagtgggttttcgccaactaaacacacttatgatcaaaacatgcccggatttgcacccagatcaggaaacagaacatgacgccaccctgcgcccttcttgcttcccttctgtttactgcactcctcgtgaaggtaacctttgtcatcgcttctaacagcctggattaattttgcctgttttttgggctttctaccaatgggatcatacaatgtgtagagaggatgtaggtttaagatgagatttgttgccccccccatgctcgatttatcccatgttcctagaaattatagagataacacaagtggaaagacagtctcacagtctcatgacaggaaggttacccatccggggtcaaaccatgcttggcacagagccacttgttaggattcagcagtaattaaaatgactgtgttgtttataaattgttttatgagtgcattagtgccttgtttattttttatcaccagagaaagagtgatcctcctaagtaaatgttctagatcagttgagaaagcaaactttctcagccaagggccagctagtaaatatttttggctttgcaggcgcatatggtcttcgttgcaaccactcaattctgctcttgggatgcaaaagctgtcttggacaatatatgcacaaatgaggctggctgtgctccaaaaaagctccatttgtggacattcaaataggaagttcacataattttcacttgtcacaaaatattattcttccaactttttaaacttgaaccatatttgagagggaatctttctgaagtgttttgttttttcttttttgttttttgtttttgagacagagtctctctctgtcccccaggctggagtgcagtggcacaatcttggctcactgcaccctctgcctcctgggttcatgccattctcctgcctcagcctcccatgtagctgggactacaggcacccgccaccacgcctggctaattttttgtatttttaatagagatagggtttcaccgttttagccaggatggtctcaatctcctaacctcgtgatctgcccgcctcagcctcccaaagtgctgggattacaggcatgagccaccgtgcccggccatctttctgaagtttttaaacactgatctaaattctcaggatgagctgagaacattttcttagtaaatatgggcaacatggtttaataaaacatggaaaccctggcactgtccttttgccgtgtctctttgggcaagttttaacttctctgggtctgtttcatcttctatgggatggggataaaaggaaggacatttagccattagccccaggagagccatgctagttatttgtgaacagaaccccatctgaagagtcacggaggatcctagttggtcagtgtccaggctgtggcagttgttaaatattttgaatatcactctttgtcatgacatcctctctactgaggtcttgtatacactatggccagcatttgcgtcgtgtatagtaattgctgtttctcctcttcccatggaaatggctgtaggcattcttggctaagagggatacttctgtattaactaccgcaactcaaggacttctgtgctacaggtggaatatccttatccaaaatgcctggaaccagatgtgttttagattcagatttttggatttgggatttgatatagtgtggctgtgtccccacccaaatctcaccttgaattgtaataatccccatgtgtcaagggtggtgccaggtggagataatggaatcatgggggcggttccccccatgctgttctcatggtagtggataagtctcatgagaactgatggttttataaatgggagttcccctgcacaagctctcttgcctgccgccatgtaagatgtgactttgctcctcatttgccttccaccatgattgtgaggcctccccagccttgtggaactgtgagtccattaaacctctttcctttatacattgccccatcttgggtatgtctttattagcagcgtgagagcagactaacacaggattctaggcctgtagtttgtgtagttttccattcccctagtggccaccaggatgtgagctgtaccttcacctagcctgcccttaagtcagctcctctaccaactctaccttgctgtttcagattggtaggctgattaaaactctctaaagccagaggaggcctgcattccaccctcagctgagtgtgagccccgtgtgacctaggaagtcagcagcacagactttggggccagatagtctggtggaaccccagcccctgccattgatgttatgtacatcctgggacgtgttacttaccctctctgttcttcagttttctcctctgtgaaatggggagaaatagcacctactgcatagtggctgtgaggattaggtgaattagtatgtgagaacatttcaaacagtccaggaagcactatgtaaatattagctgtcattattttttttgttttcactcaaaacacattacttggttctgatgcttgctagagatagttgaggttcccgggtatatgatctccagattagagaagttacatattaagtgacagatttggtgttgggaggaatctcatgggcatttttttaggatttgattattttctgttgtatctcattgtcgtctttttaatagctgtagacatctaatcctgagctagtgttttactgttctgttactcataaaaattctgaaatgcaggggttaagaatagacaatcaagtcttaagtgctttgcaaaatgaatttattcctttgagaattaaagtgatgtcctgaaggaagtcacagttaatggtcagtttcctttagggaaatattcttgaagaattagagtgctgctctcacatatctttgatggaaaccaaacaactcctgggttaatgtttagttaaatgaaccaaaaaaaaaaaaagtatcactttgcttagttagaagcagaggaaaatattaattattcgaatggagaaatgtttgaaaatgagaaataattatgttacggtggtgggattacagatgataagtatttttctttttttgaagttgggtaagtatttttctttttttgaagatggatttgccttttaaaaggaaagggggaaaaagcctgaagctgttacagtctgtctctaaactaaattatcttcactgcaatccaacattgtgcagctaagtatcataaaattaagactcacagcctaaaccctctaataggtaagactattctaagacactggtaacacgtctctgaaaagtgctggcgttttgtgctgttagtttcctgggttgattttggtttgagttcacagcagaagtctgttgggtagccagaaaggaagaatcatcacgttgggacacaaatccgagtcctgtctgtcctttgcattcttccttcccccacgtcgtcctggcttggcttcaagcaagtctgtgaggtaaaggttggtggcttagcttcctagggcttctgtaacaaattatcaccatctggtagtttttattgttttggtttttgtttgtttgtttttggcttttgtttttgttttttcgatggaatctcgctctgtcgcccaggctggagtgcagtggcttgatctcggctcactgcaacctccgcctcctggtttcaagcagttctcctgcctcagcctcccaagtagctgggactagaggtgcccgccaccatgcccagctgatttttgtatttttttttagtagagacagggtttcaccgtattgatcaggctggttttgacctccagacctcaggtgatctgcctgccttggcctcccaaagtgctgggattacaggcatgagccaccgtgcccggccaatctggtagttttaaaacaaaagaaatttattatattacagttcaggagcccagaagtcccaaatcaacatgtcaggagggccacactccctccaaagtctcaggggaagatccttcctggcctcttcccactcctggtggcttctgttgttcctcaccctgtgactgcattactccattctctgccaatgtcttcacacggccttcttccctttggctctgtcaaatccccttcgtctttctgaggacaccagtcattggacttgaggcctaccctaaatccaggatgatcttatctcgaggtctttatttaattacacctgcaaaaaccttacttctacatgaagtggcattgttcgtctgggttaatacctgaggttcattgcctcatgccaaggaaatcaaggacactgacacacaaggagtgagtttaagagcaggagtttaataggcaagagaaagaggaaagctctctctctccttcagagagagaggggctcctgagtgagtcttccagttccatggtgaaatgcatggggaggggggggtggtggttaatagatgagcgtggagaggcggtgtctgatttacatagggcccaaatgattggttagataggtgtgccatttacatagtgtaggaagaagatggctgccccaccctaatcttttgttaggcaggtgggttctctacctggccagcgccatgttgcctgcttctttattgcacacctggttgacagaagggaagatggaccctccatgttgaacacgcctgacccccaggtagccatttcctatccgcagagctgccggcattcacccgtgcaagcttccagcttgcttatctatgtctgcagctcgattttacaggctgctctgctagaaaagaaatgatctgggggctgctttttgttaaaacagaaaccttgctgaggactctcttaccctcgctaactgcctaaataatttctttctagttcctgtagcacaaataagattacattctcaggtattggggattaagacttgggaccactccttaagccactgtagctgacctcacagatgtctcagctgaccaccaggcaggtgtttccacccaaggacgcacttccccattccccatggcaccagcaatgtggagtggggagccgcggagcagggagccagcagcttaagtttgaaatccagctcactgttcttgagactggaacctggagggcattattaaatgtctcccagccttggttcctgtcttgtgtaaagtgaaggtgacggtgtctacccctctgggtcacaagaagcatgtgggagaatatgggaaagtagctgacagggtgcacaagttacagcaggaactcaatatgtgtccttgagtctgaatgcagtcatttagggtcctcagtattaactgccttgctctcaggtggatgatgtttgaggattaacaaatctgttgggtgaatccagataaatggggagttgacctttctggatgacacaggttgttgaccatggtttaacatattcaataagttaatataaagagtcttggcagtgcctggtgcggcaaagggacctatatctgtggttgtcattgtcgttgctatggttgccattgctatggcaccataaccttgttgatctgaaccagtagagatgaggctttgaggtggcccctggagatcacagctgaggagccctaagcccacccccagaaatgttgtgaaagtggctgccttctttcctttacctaacttgtgacatccttcagcccaggactcagtacacagtgggccctcaaaaaataggattaactattaactgaaagatcttattccaggtgttcagggaatcagcagaattagcgtgactttctgctaataatatcttcaactgatgtgataagagtagagttctaccagtggccactgcaaaagacacagagcatgcaaaatcctctctccttttatcagaaggaagagcttctccatcctttcaaccttggaccagtaattggtccctttaggagttagtttaagaaaagctatgcatgccttagccagcctgaagtcagacccttaatgggaagctggtgctttattgatgctcagtaacagaacactgctttgagctcaaaataacttctactaagctccttcaacagcttgctccctaggtggctcagtgttttgctgctgtctgaagttgtatatactccagtgaagcttgagtttcttcatggtcatcatccactatcaccagttaatatgggctgaatatccataacatgtcagactcagtcgggatacataaagaagaccctgtacctgcactggggttgtgggtctgagggccattagaactctagatggctgcacagacacaggtgaggctgtggagcaaaggcagagttggtggtgaagggcctatttttaacttttattgccgccatgttgctcctacgatgccattatgaatggtctctgtgagtccaggcagtggttagtgtctactcagaaacctcacaatgtctgtcctcctgggatagaatatgaacagaatccaggtctggggccatggatgttgaacgtgatagtatgtttcctggtatcactaaggtctgatctcttcccgttttcctacagttctatgaacatttctttctaacacaatgttttcttagggctaattttaagttattttttggggactatcatcccttatatccttctccttccaaggtatcccaaagttgatgtgcagtgttactgtacactttttcagcatgtgcaaatctgtctagcttataatctagcatcattttgtgttgttttacattttatataaattgtattacactctacagattcgtttgaaacttgttttctgtccaacctgatagatttgagatttatccatattgatttatgtagatctagttcattcattttacttgttatatatgatgacagtaattggttcgttttcctaatggaggacagctagattgcttccacatttctgctcttttaaacagatatatatatagatagatagacagatagatagatagattgattgattagatagatatagatatatagatatatataacatatatgtgtgtgtatatatacatatatacgtatatgtgtgtgtatatgtatacatatatacgtatatgtgtgtatatgtatacatatatacgtatatgtgtgtatatgtatacatatatacgtatatgtgtgtatatgtatacatatatacgtatatgtgtgtgtatatgtatacatatatacgtatatgtgtgtatctacatatacatatatacatatgtatgtgtgtgtgtgtgtgtgtgtgtatatatatatatatatatatatatatatatatatatatcctgcagtagctcttcttgtgagattctcctatgtgagaattcccctaggtctggggtgtactcagaaggggaactgccagtcatatgtatctttaactttactagctttggcaacttgctctgcaaagtgtctgaaccaatttacattccaccagcagtgttggaggattctacttcctcaaattcttaccaataaatgcttttatcaggttgaccaaaaagattccatgtggctggggtgaaagagcaggtgtttgcctctctgtgattgctgggaaggttaaacaccttttcataggttgattagccatcagtgttgcttcttctgtgaattgtttgtttatatctctagcacctttttcctccttcctgttttggggcatgaggaagagaggtgatgctttactcactgattggtagaaattccttacatattctggatactaattttttgttgatataagttgcaaattatcttctgctgggatttgacattttcataaaatattttgatgaaagaaaaatgagaaatagggaagagcattcaacctttaatagaagcatctgtaaaagggtctatttgttctgctcctgagacaagttggtggtgtgttaaactaatgaatcattacagttcccatatatgcagttatcattacatgagccttttttatttctttctgaggttttattttgctttgctttttttttttttttttttttttttttgagagtttcgctttgttgcccaggctggagtgcagtggcaccatgtcagctcactgcaacctctgcctcccaggttcaagcaattctagtgccctagcctcctgagtaactgggattacaggcacccaccaccatgctcggctgattttttgcatttttgtagagacagggtatcaccatgttgcccaggctgatctcgaactactgatctcaggtaatccacctgtctcagtctcccaaagtgctaggattacagacatgagccactgcactggtcttgctttgcctttttaaggcatcacctttagggacttgcctttgttcttgatggttctccagggtcacttgtttgagactttagtaacaagttgctgataccttaggtaatgatacttacaattacctaagtcccagatgaacgtgaagtctgcccacttccaggtcatgggatcttaagttcttatgacccataaaagacttagactagcttcttgacacctaccagctcatgggtgagtagctcccatcctcccaaactagaagcaattcatttcattacaaacccaccaaaaagcacaattctgtccaccaagagataacggctgttagtaccctgaaatatatcctgttaaactttttctaatacatatgagtatgtgaatatcatataactaaagtgatcataaaatacttattttagattgtaggtttttttacacaatacgtgtctcagaagtcttcctaggttaatgcatacactcctacagtggcagctttaatggctgtgtagtattccattgttatcttgaagattttaaaacatcttttttgttggatatgtggctgatttccatttttttactataaggagcaatctttaagtgaaccttcttgtacatggatgtttgtgaacatccaaaatctaagacctggaattgcagggtgaaagttacactgatctctgcgacttttgttgtataccctacaggtgtttagcataatggggaggggcagttgtctggggctctcatttggaggaaacttactgagcatgaattggggatacgaagatgataagatgatctcactcccttgtgtcaggggctcatggtctagggcagcagtcttcaacctttttggtgcagggactggtttcatggaagacaatttttccatggacccggttgtggtgtggtttcaggatgaaactttccacctcagatcattaggcattagattctcagaaggagggcatagcctagatctctcaatgtgcagttcacaatagggtttgtgctcctatgagaatctcatgccgccggtgatctgacggtaggcagagctcaggcggtaatgcttgcttgcccgccgctcacctcctgctgtgcaccccagttcctaacaggccatggacaggcaccggtccatggcctgggggttgggggccatacactggcagctgggcaggaggcagcaggctcaggacatgaggaaactgaccctaggagggaggaggttggtctccagtttcaggaggtagatgtcaactgcctgaaattctctggagacaatacccctggctcccctctccacacatcagccctctgtctgaatgatataacatgattcccttgactaaaagcacagcccttgctgtatctgaggtgagccacaaaacctcttgcacttcagtctccacccctgttagttgtggagaataatacctgtagcttgctctgcttcacagccatgagatgcaaggcacataatggatggaagagtgctcggccactgtgaagctctgtgtaaatgttatatacacagtactcccaatgccgtcctcagagcgtgcacgagggcgtctgatgaataccagctctcagaagatgttaaagaggatgctggtctggacgtagtggctcacgcctgtaatcccagcactttgggaggccaaggtgtgtggatcacctgaggtctggagttctgagaccagactggccaatgtggtgaaactccatctctactaaaaatacaaaaattagctggacatgatggcgggtgcctataatcccagctacgtgggaggctgaggcaggagaatcacttgaacccgggaggcggagattgcagtgagccgagatcacgctactgcactccagcctgggcaacggagcaagactccgtctcaaaaaaaaaaaagtggatgccggtcctgaaatgagacctcccttctgaaccggagtgtggacagcccaggaacccaccgccgcagcttaaaatcctcagctgaacatcactgggggagcacatgggctctgcttgcttatggcctgggttcaaatcccaggcctgccatttccagctctgtaacctcagacaagtgactcaaccccctgtaccgcattttccacatctgtgacatctgtgacttggtgtggtcaatgctcaatacatgtaagcttttattattgttgttgttgtttacaactttttgttgttgttgttttaaagacagggtcttgccctgttacccaggctggaatgtagcggcatgatcagggctcgctgtagccttgacttcccagcctcaagcaattgtccttcctcagccccacaagtacctaggactacaggcgtgcaccaccatgcccagctaattttttttttttttattttagtagggatgaggtcttgccgtgttgcccaggctggtcttgaactcccgggctcaaatgatcctcccactttggtctcccagggtgttaggattacaggtgtgagccactgtgcctggccatatttgcagcttgttaatacttacaaggaaactgttagaacagaaaaagaatcattccctcagccatttaaaagcatcctaaaatcaagttcttgttttaagatagttttcattcattgttctggtacttcctaaatagtttcttcccagtaaaagtgcccccactttggtggtttaattataggccatgaggatttgctttttccgtgtaaggttggaagaaaaagttggtttgctgctataggaaatgagtagaagctctgttgccctcgacagccttgtggagttgtcctggaagcctatgtccagagctgtctcccaggtcatcctattgctgcactatggccgactcccatgcagagagggtccttttataaaaacctaaacataaccatgttgagagagcagtcatccctgccgaacctttgctgaagccagttgcctttgctcttagatgatctttgtgcatccaggggttctagaacgttagacccaagagtgtctggtcctagctttgggggtttcttggcctaggatgcaatattttaatggataggatcaacatcagagtaaattttaatttttctaaataaagacattattaaaagttaccagctgagctctgtggttcatgcctgtaattccagtactttgagaggccgaggcaggcagatcacctgaggtcaggagtttgagaccagcctggttaacatggcaaaaccccgtctctactacaaatacaaaaattagccgggcatggtgctacatgcctgtagtcccagctacttgggaggctgaggcaggagaatcgcttgaacccaagaggtagaggttgccatgagccaagattgcaccactgcactccagtctgggtgatccgtctcaaaaaaaaaaaaaaaaaagttaccattggccaaatcaccattttatcaaagaaaagtttatttttacacccaccctcctcaaaaaatagaaaaagaaaggaagcaaagacataagcctggtacatttccaaagactatataaattaatttcatgtaaaacttcctcctttgttcttgtttttcgccggtgcgtccaaggaatcacagacttcatgtacacaaagaaaaggagataagatgacttggtctgagtggcgtggtagatcacactcaggcaagactggagcatgaacggttctcctgaaaattccttctaggctgctagtcagtgagttgtttaaactgactccaatccttttgttgtgcagatgcaaactgtgatgcagttgaattatgtgatttgttttctaaattgttcataaccaaaaaacatcgattcatttttatttatttattttttattttttgagacaaagtctcgctctgtcgcccaggctggagtgcagtggcgcaatctcggctcactgcaacttccgtctcctgggttcaagcgattctcctgcctcagcctcccgagtagctgggattacaggcatgtgccaccacactcagataattttgtatttttagtagagacagggtttcaccacattggtcaggctggtctcgaactcccgacctcatgatccacccgcctcagcctaccaaagtgctgggattataggcatgagccaccgtgcccggcccaattcattttattaaataaagaaacatttatttagagtttaaatgtctgatcttgaggttgcgtcagggtgaagactaagctgctgtaataaagacatatgaaattagtggctaaggaaagagagaagtcggtgtttcctcccatgtagcagtccttggtggggtggcatggctccatgtggtcattcagggacctgagctgcttccatcctgatgctctgttgtttttcctgagtgctttcctggtttgcttggtggaagctggattgctactgtgtgtgcatggaagtggaggaagaggatgaggcaccaaagctctgtgtcttgaggccaagacccataagcatcacagcactctgtgcacagcccactagcccaagcccagtaaagcagttgcatataactgcaagagaggcaggcaaatggagtccccagctggaggccacatgcacagctgaaacttgggggtggagggaggaggggttcctatcactaaaagaagaggagaatgactacttggggacaaagagcagattctttgtcatggacatgaagatgtttttaatccattctttctgtctagcagaatgggaaaaggaaacccctgcttctagaactgttccaatgttctgcccatcttgccagactctccctatatttggagggcaaagattcaggcagacatctcttggtgtaaaagtaaatttatctggctgggtgtgggggcccacgcctgtaatcccagcactttgggaggccgaggcagatggatcacctgaggtcaggagttcatgaccagcctggccaacatggaaaaaccccgtctctactaaaaatacaaaaaattagccaggcatggtggcggctgcctgtaatcccagctgctcgggaggctgaggtaggagaatcacttgaacctgggaagcagaggttgcagtgagctgagatcgcaccattgcactccagcctaggcaacaagaatgaaactccgtctcagaaaaaaagagtaaatctatcccacattggtggtttccctgaaggtctggtacaatggaggattccaagcctttctctttttcccaaccatggctcttccactggagtatttcacagggagatccaaggacactgtgggaagaagatcttggatccccaaagcccaaatctgatcgcgttgcccagtgttagtgatgacagctcttcctggcatatgttggttgggtggggtggtctaaggactgcaggatgttttagagcctaaatttaccaactttcggcccctgcttgatgatgctcaacagaacgaacaaagctgtagattacttgtccagatggcctctttatttttagattggtgatcagtttccagcgtctctttatttcttcaccatgatggtctgaatgatgacttcaatgaagggcaaactcaggcactctaggaaagatacattactcagcgtgttattgcctgacacgttctgggaaatcacaggacaatcatcttcatgtgcaacatgtgggtttttttttaatttatttgtttgtttttggcacatttacagttaaattccccagatccaagaaaatgacttcccagttcctggggaaaataaattacgaatggagatggaacccagctcctctctaccacacggggcccagaacatcgtgttctctgctgcaaaactgcatagatcaggttggccacagaactgcaggtgcctcactgatccacattcctcagttaaggaccaagatagaaacctttatatatactctcactgagggaattaattaatgtctgtgttagtttcctagggctgccataacaaattgccacatttcggtggctgaaaacaatagacatgtattctctcacagttcagggaaccagaagtccaaaatcaagagactggcagaaaacaaggtggttccttccatcccatgactccctcctagtttctgctggtgttcagcagtctttgccagtctttgctttgacgatgcattattctaatgtctgcccctgtcttcacatgaccctcttccctgttcctccaattttcaaatctccttcttcttttttaaaaaattatagataagatctcactctgttgcccaggctggagtatggtggtgtgatcttagctcgctgtatcctcaaactcctgggctcaagcaagcctttcaccttggccccccaaaatgctaggattacaggtgtgagccactgcacctggccttccctcacttttctttcgcaagtacatcagtcgttgaatttagggcccatcctaaattctagatcaccttatctcaagatcctcaacttaggtatatttgcaaaaactctattttattttcttttccttcttttttttttttttttgagacagtcttgctctgtcacccaggctggagtgcagtggcgcaatctcggctcactgcaagctccgcctcccaggttcacgctattctcctgcctcagcctcccaagtagctgggactacaggtgcccgccatcaagcccagccaattttttttgtatctttggtagagacagggtttcaccatgttagctaggatggtttcaatctcctgacctcgtgatccgcccgcctcggcctcctggattataggcgtgagccaccacgccctgccaaatttatttattttcaaataaagtcacattcacagataccagggattaggacttgggcatgtcttttcaagggatgcaattccacccactacaatatcatagcaaacgtgcatcaaaaaggttaaatctattaccaccgatcccatgttgtgttgactgcaaaggcgtacggcatcaagccttggaaatgtaacaggcccatttttcgcagttggaaaatcagaagtgctagaaagagagctggctcatcctgtagggatgggtggtgggtcgcctcaggccctcctttcattcccagggaccccgtttgcacagctgcgtgtggagccggctagcacgttgtcagcaacacttctttccgtgtgcttgctcccttagtctctgtaactagcaggtggttgtggtgcctgtcattcatctcccagggctggcttgataaacgttattatacttcttgatgggtaccttctggcgtatttaccgctttgtaactttgctgtttattgtggttccttggagcccaataaaagcaagataagaaaaagcaagcaagaacagggcaggaaaagtcagaactgtaatttagtcatgtaaggttcaattggatgcgtttttcctttgcccccctgccttcaccgctgggctgttcagagccaggctctgctccacttcatccccatcccagtgacattacaccctccacatccccatcctttctggagtgatcagtatcttcttcagtgcatgatggaaaggggaagattttagttcatatcagatgttcagaatctttgtaggaaattgaaaaaatattaaacctttttttttttttttttttttattatactctaagttttagggtacatgtgctcattgtgcaggttagttacatatgtatacatgtgccatgctggtgcgctgcacccactaacgtgtcatctagcattaggtatatctcccaatgctatccctcccccctcccccgaccccaccacagtccccagagtgtgatattccccttcctgtgtccatgtgatctcattgttcaattcccacctatgagtgagaatatgcggtgtttggttttttgttcttgcgatagtttactgagaatgatggtttccaatttcatccatgtccctacaaaggacatgaactcatcattttttatggctgtatagtattccatggtgtatatgtgccacattttcttaatccagtctatcattgttggacatttgggttggttccaagtctttgctattgtgaatagtgccgcaataaacatacgtgtgcatgtgtctttatagcagcatgatttatagtcctttgggtatatacccagtaatgggatggctgggtcaaatggtatttctagttctagatccctgaggaatcgccacactgacttccacaatggttgaactagtttacagtcccaccaacagtgtaaaagtgttcctatttctccacatcctctccagcacctgttgtttcctgactttttaatgattgccattctaactggtgtgagatgatatctcatagtggttttgatttgcatttctctgatggccagtgatgatgagcatttcttcatgtgttttttggctgcataaatgtcttcttttgagaagtgtctgttcatgtccttcgcccactttttgatggggttgtttgtttttttcttgtaaatttgtttgagttcattgtagattctggatattagccctttgtcagatgagtaggttgcgaaaagtttctcccattttgtaggttgcctgttcactctgatggtagtttcttttgctgtgcagaagctctttagtttaattagatcccatttgtcaattttggcttttgttgccattgcttttggtgttttggacatgaagtccttgcccacgcctatgtcctgaatggtaatgcctaggttttcttctagggtttttatggttttaggtctaacgtttaaatctttaatccatcttgaattgatttttgtataaggtgtagggaagggatccagtttcagctttctacatatggctagccagttttcccagcaccatttattaaatagggaatcctttccccattgcttgtttttctcaggtttgtcaaagatcagatagttgtagatacgcagcattatttctgagggctctgttctgttccattgatctatatctctgttttggtaccagtaccatgctgttttggttactgtagccttgtagtatagtttgaagtcaggtagtgtgatgcctccagctttgttcttttggcttaggattgacttggcgatgcgggctcttttttggttccatatgaactttaaagtagttttttccaattctgtgaagaaagtcattggtagcttgatggggatggcattgaatctgtaaattaccttgggcagtatggccattttcacaatattgattcttcctacccatgagcatggaatgttcttccatttgtttgtgtcctcttttatttccttgagcagtggtttgtagttctccttgaagaggtccttcacatcccttgtaagttggattcctaggtattttattctctttgaagcaattgtgaatgggagttcactcatgatttggctctctgtttgtctgttgttggtgtataagaatgcttgtgatttttgtacattgattttgtatcctgagactttgctgaagttgcttatcagcttaaggagattttgggctgagacaatggggttttctagataaacaatcatgtcgtctgcaaacagggacaatttgacttcctcttttcctaattgaataccctttatttccttctcctgcctgattgccctggccagaacttccaacactatgttgaataggagcggtgagagagggcatccctgtcttgtgccagttttcaaagggaatgcttccagtttttgcccattcagtatgatattggctgtgggtttgtcatagatagctcttattattttgaaatacgtcccatcaatacctaatttattgagagtttttagcatgaagggttgttgaattttgtcaaaggctttttctgcatctattgagataatcatgtggtttttgtctttggctctgtttatatgctggattacatttattgatttgcgtatattgaaccagccttgcatcccagggatgaagcccacttgatcatggtggataagctttttgatgtgctgctggattcggtttgccagtattttattgaggatttttgcatcaatgttcatcaaggatattggtctaaaattctcttttttggttgtgtctctgcccggctttggtatcagaatgatgctggcctcataaaatgagttagggaggattccctctttttctattgattggaatagtttcagaaggaatggtaccagttcctccttgtacctctggtagaattcggctgtgaatccatctggtcctggactctttttggttggtaaactattgattattgccacaatttcagagcctgttattggtctattcagagattcaacttcttcctggtttattcttgggagagtgtatgtgtcgaggaatgtatccatttcttctagattttctagtttatttgcgtagaggtgtttgtagtattctctgatggtagtttgtatttctgtgggatcggtggtgatatcccctttatcattttttattgtgtctatttgattcttctctctttttttctttattagtcttgctagcggtctatcaattttgttgatcctttcaaaaaaccagctcctggattcattgattttttgaagggctttttgtgtctctatttccttcagttctgctctgattttagttatttcttgccttctgctagcttttgaatgtgtttgctcttgcttttctagttcttttaattgtgatgttagggtgtcaattttggatctttcctgctttctcttgtaggcatttagtgctataaatttccctctacacactgctttgaatgcgtcccagagattttggtatgtggtgtctttgttctcgttggtttcaaagaacatctttatttctgtcttcatttcgttatgtacccagtagtcattcaggagcaggttgttcagtttccatgtagttgagcggctttgagtgagattcttaatcctgagttctagtttgattgcactgtggtctgagagatagtttgttataatttctgttcttttacatttgctgaggagagctttacttccaactatgtggtcaattttggaataggtgtggtgtggtgctgaaaaaaatgtatattctgttgatttggggtggagagttctgtagatgtctattaagtctgcttggtgcagagctgagttcaattcctgggtatccttgttgactttctgtctcgttgatctgtctaatgttgacagtggggtgttaaagtctcccattattaatgtgtgggagtctaagtctctttgtaggtcactcaggacttgctttatgaacctgggtgctcctgtattgggtgcataaatatttaggatagttagctcctcttgttgaattgatccctttaccattatgtaatggccttctttgtctcttttgatctttgttggtttaaagtctgttttatcagagactaggattgcaacccctgcctttttttgttttccattggcttggtagatcttcctccatccttttattttgagcctatgtgtgtctctgcacgtgagatgggtttcctgaatacagcacactgatgggtcttgactctttatccaacttgccagtctgtgtcttttaattgcagaatttagtccatttatatttaaagttaatattgttatgtgtgaatttgatcctgtcattatgatgttagctggtgattttgctcattagttgatgcagtttcttcctagtctcgatggtctttacattttggcatgattttgcagtggctggtaccggttgttcctttccaggtttagcgcttccttcaggagctcttttagggcaggcctggtggtgacaaaatctctcagcatttgcttgtctataaagtattttatttctccttcacttatgaagcttagtttggctggatatgaaattctgggttgaaaattcttttctttaagaatgttgaatattggccctcactctcttctggcttgtagggtttctgccgagagatccactgttagtctgatgggctttcctttgagggtaacccgacctttctctctggctgcccttaacattttttccttcatttcaactttggtgaatctgacaattatgtgtcttggagttgctcttctcgaggagtatctttgtggcgttctctgtatttcctgaatctgaacgttggcctgccttgctagattggggaagttctcctggataatatcctgcagagtgttttccaacttggttccattctccacatcactttcaggtacaccaatcagacgtagatttggtcttttcacatagtcccatatttcttggaggctttgctcatttctttttattcttttttctctaaacttcccttctcgcttcatttcattcatttcatcttccattgctgataccctttcttccagttgatcgcatcggctcctgaggcttctgcattcttcacgtagttctcgagccttggttttcagctccatcagctcctttaagcacttctctgtattggttattctagttatacattcttctaaatttttttcaaagttttcaacttctttgcctttggtttgaatgtcctcccgtagctcagagtaatttgatcgtctgaagccttcttctctcagctcgtcaaaatcattctccatccagctttgttctgttgctggtgaggaactgcattcctttggaggaggagaggcgctctgcgttttagagtttccagtttttctgttctgttttttccccatctttgtggttttatctacttttggtctttgatgatggtgatgtacagatgggttttcggtgtagatgtcctttctggttgttagttttccttctaacagacaggaccctcagctgcaggtctgttggaataccctgccgtgtgaggtgtcagtgtgcctcccagttaggctgctcgggggtcaggggtcagggacccacttgaggaggcagtctgcccgttctcagatctccagctgcgtgctgggagaaccactgctctcttcaaagctgtcagacagggacacttaagtctgcagaggttactgctgtctttttgtttgtctgtgccctgcccccagaggtggagcctacagaggcaggcaggcctccttgagctgtggtgggctccacccagttcgagcttcccggctgctttgtttacctaagcaagcctgggcaatggcgggcgcccctcccccagcctcgttgccgccttgcagtttgatctcagactgctgtgctagcaatcagcgagattccgtgggcgtaggaccctctgagccaggtgtgggatatagtctcgtggtgcgccgtttcttaagccggtctgaaaagcgcaatattcgggtgggagtgacccgattttccaggtgcgtccgtcacccctttctttgactcggaaagggaactccctgaccccttgcgcttcccaggtgaggcaatgcctcgccctgcttcggctcgcgcacggtgcgcacacccactgacctgcgcccactgtctggcactccctagtgagatgaacccggtacctcagatggaaatgcagaaatcacccgtcttctgcgtcgctcacgctgggagctgtagaccggagctgttcctattcggccatcttggctcctcctccaaaaatattaaacttaaaacaatttcttcttttaaaatatgtattatgagggatgttgtagtatagccactgtagaatgagagaaaatattatacagatctgaacatgtagcaggcgtggagcgctcaggtttcacgggtggccttggaggttctggctctgatgctacagagacagccaagtataaaggggtccctgagaacctccaacctggcctgtgcactgggaggagtgtgcgctgtgggggagccatggaattttgtgctgtctgcagtgggaaggagcttggcctctcctcttccggggcggtaaccggggattcagtctgtgaggcgggaagcccactaggaggactctcactttgctgagtctctctttcccttctttcttcttcacccaataaaccctgtccttctcacccttcaaagtgtctgtgagcctaatctttcatggtcatgtgacaagagcccggcttttagctgaactaaagagaaagccttacagcactaccatccagcgtcctcctccttcctgccctggattctttagaaatgactggaaactctctccagaaggtgttttctgtgatggcataaatggatcactggaggcccagggccagtgctctctctctgctgtgcttccttggaattctggcccccagccctttcctgaacgcgtcatctccttgagggtaaaaggagccagagaacactatcatcgcagatgcttcatgtgaattgttccatttttaagacaaaggacgacagttggccttaaaaataaatctcatttgtgtttcttttggttgtggagaagtaaagaattttcaaaacgggtcctttttatatacaaacgtttgtctaaatagagcatctttagatcttaaaatgaacagcaaagcgagcactcggagatgcttctgttgtgggctttggtagacagagagagaggtgaaggtcccttctatgcctttttctctttcaaatagttgtttttattgtggtgaaatatccatagcataaaatttaccacttttaactgtggaatgtacagtgtagtcaggtttagcaccttcataatgtcatgtgctcatcaccaccatccatctccagagcttccttgtcctccctgaatgaagctctgtactcatgaaacaccagctcctcattttccctcccctccagcccctggtaaccaccattctaccttctgtctctatgaatctgactgctccagacacctcacataagcagaatcattcagtatttgtcattttgtgactggcttattatttcacttagtatgaagtcctcagggttcattcatgtagtcacatgtgtcagaattttattcagttttaagactgaatagtatctcgctgtatggatataccgccctttgtcgattcactcatcaatggacacttgagttgtttgcaccttcccccgcttcccactgaagccttcctctccatcagttcccggctgtcgctccctgcctctccttggtgatcgcctctggaacagaattttgctgttaggagccactcctgtcaacaggatttcccagagtgtgttaaaagaaaaagcaaatggataatagctctaaataagaacttgctttgggtaagctttggtgacatctgcaagaaaaaaaaaagtggcctgggaaacagggagggttcctggcataataaacattttcttaaacctttatgcaaatcccagattagtagatattgcgggagtcagtttctaaaagaaaacttgatttccgaaggccatgcacagttattctgtttctccatgtgttttgtttgtaagaggaaaacagtggaatagagaatgtttgccacagccaaggttttctctagtccctttggtaggtggaaaccaagtgctggatgaaattgtgtctggatgctgaataaagacatggtttgctgaattcattttggcagcatacactgaggacaaagcaccagtgtacaaccacactacttaattaggattctctgaagacatgccaatagcatctgctcagaagtagtgctgcaaaaagattagtcttgattttgagtatgacttgatttagccagatgcataggcccacttctttaaaagaaagtccaaatttatcttctgtgttctttgagggagtgacaacctagaatcagcttgaaacataaaatgtgcaaagtaaaatttttacaattatgattgcacttctaggatttagtaaacctttaaccaccaagagactggacttgggggtgcgttgcctgtgataggatgccaagttgtttcttggcagaaacatggagattgttaaaccaggatggtaaagagtgactttgtctgtgtcagctactctgaagctatccctgagtcccctggaagacataagcatcccttcctccatgaccccaaggctccttgtgaataataccacattagagcacttgtcacgtcatggtggaattttcatgtgtacatggggtttcatgtacacacgtgtgtatgtaaagggcacagactgcattgttttattccaagcatggggccaatgtattgcagtaacaaggacaaccttttattagatggctactgatcacagtgagaaaggcattagcaccatttcacaactgaggaccaagtagtttagaattccctctggtcactcaactcataagtggacccatgagacctgtgggactccaaagctggtgcttttctcattagaacatgatttccatgttggtgggaatacaccatatgtctcataaaagagttaattatcaaaatcacaatgacattcttcacactcactgggatggccatgatcaaaaaagataatagtaagtgttgatgaggatgtggaaaaattgaaaaccttgtaacttctggaatgtacattggtacagctcctttggaagagtatttggcagtcactcaaaaagttaaagttgccataagacccaacaattcctcttctaggtatataccgaagagaatgaaaacatatgttcttacaaaaattaatacaagaagggtcatagcagcatcattcatagtagccaaatgtccatcagctgatgaatggctaagtaagtgtgatatattcgtgcagttgaacatgattaggcaacaaaaaggaatgaaatacaacacatgctgcaacatagatggacctcagagacatcctgctccgtaaaagaagccagacgcagaaagtcacatattgtatgattccatttatgtgaaacatccagaataagcaaatctgtatagacagaaagtaggttagtggttacctagggctggggatggggagcatttgaaggggattgaggaggaactgctaatgactttgaggttcctttttgagatgacaaattgtgataatgggagcacactgtattaaaaaccatcgaactgtatactttaagtagatgaattgtctggtatgtgaattgtatctcaaagctgtatataaaaaataattaatgaggccagatgtggctgctcatgcctgtaatcccagcactttgggaggctgaggtgggcggatcacgaggtcaggagatccagaccatcctggccaacatggtgaaaccccgtctttactaaaaatacaaaaattagctgggtgtggtggcacgtgcctgtaatcccagctactcgggaggctgaggcaggagaatcgcttgaacccgtgaagcagagattgcatgcagtgagctaaaattgcaccactgcacttcagtctggtaacagagtgagactccgtctcaaaaaaaataataaaatgaagttaaaccaaagaaataccaggagacagtaacattaaagaagtctgaaagagctcatacgaatgtataaggaccccagtagataaactggcaaaataattctaaaagagagcttacagtagagggaatataattaccacacagacaaatggaaaacattctggttctttaacaaagatattaaaattagaaaaataaagtactgtaatatttctcacatatttaattagcaaagcattttaaaaatgattatcaattgctgggaaagagagcaatatttttctatgtttcaggttatatcgtaaattgatactactcttagaaatcagtggccatatatatcaagagttgtaaaacatttgtggctattctatttttagaaatctcttctaaaacatacaaaaatataaaaatgaaagactaatgatgcaaattatgactcatttatgtggtcatttaaaaattagaaaaataaaaattcagttactaagattttaaagttatatgtactgtaagtataacttacagtaaaaaacaggcaagtttaaaattactgaaaggaaataattaaaatgacccagcgatggagttgtggtggagttctgggcaattttttcatttcttattttgtaatgcaattacttttaagttttaaaacatttttataaatagaccttatatttctaagagttatgcttcctagaatattaagtttttgcagattatttcaatcggtaaaaatcaaaagatgccggctctcttggctgacctttaaattaaaatactaatgaagcatttattaccataagagaaaaatatgcttaaaacacctttcattaattgtacttttgccaaaccactctagagttgaatgattctctttctttcccaatttacatagttctgtgggaaaaaatcggacatacagtgagttaagtggagaattgttgcaagcaagccatgaactgccttttaaaagcttgtccttttgaggggaagagacatggattctccacttcatcccctcagttaaacaaaaatctgagccttgcatatttaaagataaaaatatacttaatttttaaagttattgttttggtccagtttagaaaataccacctcattttctcctcccttatgtcttgatattgatcccaaagaatgtgcgtcaaactaagaaagttaattttcatgtagcaacatctggttccttagccaattcagggaactcttgagtgcttatgctcagagcttttgctgctgtttctagattccaccctctgttagcttctcacaagcagtccggtatttggtagagtgtggggggccgggggctcatgaagtcagattccaacgtgcagggtttgtttgagatgcctgtaggatcaaccaggtttcacctctggatgtatgtttaattcagtggacgttgtcattttgatggcacatacccttcagtaaaaagaggttaaaagtattctaaaatgaggtggtggattatctgtttgggtagctacatggtctctgaagtctcttccattttaagataaaattgccaaagacagtttttacaagtttggaactttctgagtgggtgatacgcattagggttttggtggtgctgattattgcatccagaggttggccctgacttctgtcgtctgctggtcttggaatacattgaagcacaccgattggagcacaccgactgaagcacaccgattggagcacaccgattggagcacactgactgaagcacactgattggagcacaccgattggagcacaccaattggcttttgcttttggagcttggttattgtgcagtgttcccacttacctaatcatcactttgttggtggtggagtggggggcctcactctggttccaagcaagtcattagaatgatctacaatttgcagttctaaaatcaggaaaacttggggtttctccaaagcctgcattaaacagaactttttctttcttgaaggtccagatccatacttaaattttacttaaattttaatgagtaatattttcccatcagtggcctaacgcactataaattatgtatgctgcacattaaattcatttttattttttcacaaactggacttaatggcatttgttgttttgtataccctatacgatagaaatttgttgctgaaaaggaattcaggggtcctccagatcactggtttccaaacctgactctttaggaagaaaacaaacaaaaatcctccagtttcgttatggacgtgatgaatgagacacccacggagtatggcccaggaatctgttctcataaaggtctccaggaaggttgggaaggaggagggaagagcgtagagctattctccctgaaaagaaataggccaagagttgattgttgtgttagctggtaatgggtacttagggatccattattctctctgctctttgcatgtatttgaaattttccataatgaaaagacttttaaaaaagattaaataacagcttcccaggtgatcctgaaaatcagccaggtttgggcagcacaatcaatccgcctctcccccttaacaggtgagaacaggaaggcgaacgaggccatgcagtttgcgtgaatgaagaactcatataggatctagaactcctgtttctgccccataggcctaagcccttaactcctcatggcctcctcagactaatcattttgctgaccttcttagcattttaaaagagaattaataaatctgacttgtatgattcacttacttttttttaaacacagaggagtgttgagtgtttttgagatgtttttctttcttcacacatttttctaagatccttttaaacccattccattggacttcaaggtagctattggcttttcaaacataggttacggggctactactttgccgctagttagtgtgtgaggccactggtaaatgaatgaatgaatgagcagtaaaggtgctgaaaagtgtaatgcgtgtctatatgaagcagtgtctattgagcaaaccggagagaccagctccatcctggaaaattaaaacaatggtactgtgactttgcctattgccaatcatcgatcagtcctgtcggtctgacttaaccttctaaagctctttaccacagtgtatagataagttgcctgtcatgtaaatatatcttattgattttgtcaggcagctggccagttttcttaaaaatgtgtcaaattgtctgaatgatttgaccagaaaccccgagagtcaacgtgaggaggaaagaaagaggaagggaacggggaaaaaaagggaaggaaaaagacaaataccacctaattgagactaaaggaatgatcactggggctaccatggcttttgtttggttttggcaaggctttattttattttttttttactgtcagtgaaaacaagaatttgtattgcaggaaaaacaaactaacaagtgttttttcctactgtactctcaacacaaagtgcttctggtcaccaaaatgtggagagatgttgccccccacccacacacaaagcaactctccagcagacaccaaccgggtgtcctatagttcagtgtaattctgagattatctacctggagatagcatcaggtccgacaagataagggttcagtcccacaacactgccccccaccatccctgcttcagacactactcataagtacaggttacccatagctgatgtccaatttagctacaaattgacccccttttagggttctcttgtttgctaggacagctcgcagaactcaggaatgcacgttacttacatttaccagtttattatcaaggatattacaaaggatacaaatgaacagccaggtggaggagatgcacagggcaagggatgtgaggaggggcccagagcttccatggcctccccggacccaccatcaacagagctttctgaaccctgaagtccagagacttttatggaggccttctcacacaggcatgactgatgattcactccatctccagaccctcaccccttcctggagactggggagcagtagagctaaaagtttcaagcttctagtcatggcttggtctttccagtgaccagcctgtatccaggaacccacccagagtcaccccatgataacaaaagacactcccatcacccaggaaattccaagggattagctctgtttcaggatgttggaaatgagtgcttgagtcgcaaaggaaataacactcgaacagaaaatatctcagcaaagcaaatttacttctgcagaagggtgcttcctgtttcagtcacgatcgcaagagcacaccgaacaagggaaggaaggggtttttaaccctaactcagttcctgtctctgtgtccttcccctattgattggggttggactgcacaacctaagatctaagctgacccgactggctactgtttgaaattgcggagggctagttgggtgggaaaggagagactgtccattacagtacaaggcatgtcagggtgcagcaagagcaggaagggtggtttaaatactagaaacgagagtacaaggaagttgggcttcagaacaaagaacaaggacattacaagttaaaccctttgaagaggaattttatcatccctgacaaggaactggggtcaaagaccaaatattagaacaaaaaagtctcctaacatccctgttgctcaggaattacaaagattttagaatctctgggccacgaactgggggaggagtccaagtgaatatttcttattatatcccagtattgctttatttttgttatagatttatcaagatacaattcatgtacccataagcttcacccatttaaagtgtatagctcagtgattttttgtgtatgcctagagttgtacaaatgctaccataatctaattttaggatatattcatcacccctaaaagaaactctatacttactagtagtcatctcccttttccccattatcccgacccttggcaaccactaatctactttttgtctctatggatttgtctattctggacacttcacataaatggaataatacagtaaatggccttttgtaactggcttcttgtattgtgttttcagggttcatccatgttgtagcatgtcatagtgcttcattgttttaatggcctaataatactccattgtatgggtgtaccacattttggttatccatcatcagttgatggacatttaggttgtctctacattttggctattgtgaataattctgccatgaacattacaggtttcatgtggacacatgttttttgttttcttgggtctgtacctaggggtagaattgcagggtcacatgtattaagcattttgaagaactggcagttttctgaagtggttacaccattttatggttcctctagcaatgagttgagggttctgatttctccacatcattgccaacattcatagttacagatcttcttgattctagccatcctcatggatgcaaagtggtacctcattgtggttttgatttgcgtttccctatggctaatgatgttgaacatgtttttatgtgtttattggtcattatatatcttctttggagagcatgtattcaaatccttggtgcatttttataatggatttatttatcttaccattgatgggaaaaacacttgttttattttacacatatctcactttgtgagtaaaaaaaaaaaaagattggaggccagattcagtggctcatgcctgtaatcccagcactttgagaggtcacagtaggcagatcacctgaggtcaagagtttgaaaccagcctggtcaacatggtaaaaccctgtctctactaaaaatacaaaaattagctgggcatggtggcaggcgcctgtaatcccagctatttgggaggctgaggcaggagaattgcttgaacccaggagatggaggttgcagtgagccaagaccacaccattgcgctccagcctgggcaacaagagcgaaaatctgtctcaaaaaaaaaaaaaaaaaaaagactggaaaaaataacaaatattttaaacacccaagagacattattaacagtttgattgacttatagttccatgtaacctaattttagggctcattctggtagtggaagaaacctgacattggtaatatataaatagagtgcacacacagaatcctgaatccttttaatgcctattaggatgggtgctaagcctgctgggagaatactgagttagtggagataactgatttacattgagaacgttctgatatttgtgattttctcatactatataaattagagattcatatgtgcaattgagaatatttcactgattctgttggaggtttttttttttttgtctttagctaagttgtatggaaactcaagagataagtacctcatttgtggtattgtgaatttttccaggggaagaaaaccttttttctcttacaaacagttgaagaaaattatcttttctgtttttaaattatcataattgggtttctccatcacagatttgtcaaactatagagtatgtataaagtcatgtttattcatttgatattctcaacataagtattctaaacttgattatgttaattcagaagaatagaacattaagcttagaattaggcaaatatatacaagttgcaattgtgtacagggattgcttatatttccaggataaaatcaaatcttatccccaaatctaattagcagctgttcattggtgtatttgacatacagcagccgacttttctcacctcaataaaccactacatcatcaacagatgcagcggagccttgaccgctaattagagttctctgccagaatcctagagcctgatgttggctctgtgaagagttgagtcaaggacatcccagcagtggtttttggaggaaggaaaattagaggttaaatgcatagccgtctacacaagagagatggttatttttttagatgcacagaagtggatctcagcattataaatacttttattaatcagtgctctttgctactttaaatctgtttccagactccactagtttcctaaagctgctgcagccaattaccaaactcgttttcttaaaacaacggaaatttattccctcacaattctgaggctagaagtccaaaagacacccatcaaggtgtctccaggccatgctttgtgcgaggctctagggaagaatccttccttgcctcttcctggcttctggggcctcccagcaacccctgtgttccccagcttgcagctacatcactccaatctctgcctccgattcacatggccatctcctctctgtgtatctttgtgtgtgtgtccttttccttcttgtaaggacaccagtcattggatttagggcccaccttaatccagtatgacttcatcctttttttttttttttttttttttttttgagacagagtcttgctctgtcacccaagctgtagtggcacgatctctgctcactgtaaccttcacctcccagattgaagggattcttgtgcctcagcctccctagtagctaggactacaggtgtgcaccatcacacccagctaatttttgtatttttgtattttcagtagagatggggtttcaccaagatggccaggcttgtcttgaactcctggcttcaagtgatctgtgtgccttggcctccccgagtgctgggattacaggcatgagccaccatgcccagctgacctcatcttaacttaactaaattgcacctgcagagaccctatttccaaataatatcactctctccgattccagctggacgtgaagtggaggggcagggggttgggaggatgggacacagaaacctggccactccatttttgaggtacatttttaatgattgtagattttcatgtatgctacctatcaaacaagataacgacatctcacagatttgggggcgtatgtttgtatatttccggaaggactctaaaaatccagatggaaattgatatttttgaggcatctaccacacgtgaggcagttttgcatcaattatctcctttaattctgtgaagttactttctatttattctggttcctcatataattgcaatttgctgaatttgttggtgagttcttaaaaatgttaccgtttcctacctgttaccatatctgtgtttatctcatgccaaatatataaataactcttcctcagccacttaacagctaaatttgggagagattctgaaactacatgagcctcagtttcctcatctgtaaaagggggccagcaattcatcattaaccttgtgacattgtggtggctggcaaataccgtgtcaaacaggaagtgttccacaagtggcagttcctcgttatgcttttcttaaagctcttttggaggtgtgcacaaattcttattctttttgtgcttactgccaaaaagggtttagggatacatgtgtcgtaccatcccattttccagtagagacattgtaattcatgggcatatcagttaagaattggatgcagctgtatacagtacaaaaattccaaataacagcagactgaatgagaatgtttatttttccctcatgtgaaaggagtagggagggggtgggccagggcttcagagcagttccacagtcatcaggaaccaggcttctgtgtctctgttgtaccatacaagcccagggcttccatgcacagtcccctctgaccccaaatggctgtgtagctccagccctcgcgtttgtgatgcatgctaccaacatgtaaaaggacaaccaggatgcctctcccagctgagtggcctccctctaggcagcttttcaggaagtttccacataacacttccactaatatctcatttgttcagtgaccatgtttagctgcaaagaaggggaaaaatgttttcttctgtttcaggcctcggtgtgcccagctcaaatgagggttctcttatgaaggagggaggggagtggatgtcggggtgggtagccagcattctgtgctgtaatgggattgtattctgtagggctctgaagatagcacttggggattgaggagtctggtctgggaagtgaaccttgtatgtagctctggatctagggttctaaacatcctgctttagaactacagccttgtaagtgatttttgaaacaactcattcataggcagagaactgtctatccttcaagcctgagagaaaatgaataatttacctctccattttgatcacctgccactgtagcattggtccttccaggcctgcgtgtgccctgggagggtgaaacaaagctttgccagaggtgcctccactgtaaagcaaacccacagatagtaactgttgaaaccagcacatccctgtgcagtgaaaagggcattccgtcggcagtcaccaccttgggcctggtcagggtttcagtgaaatccctttccttatgttctgctggcattgaacataagggaagggatttcactgaaatgttgaatgttcaaatccaagcagcttcaaggaatccccccagctcccttgctgtcaggacaggaggtggatctctgggacctcttgaaactgcttggaattggaacattcattgcttttctctagacccagaactaaggcagctttgctcaatgccttgctcagccatttcgccaagtgaggttttatgcaatgttactcgtcactactctgaatcccagtttcagattgcaggacaaacagacgcctttttaatcattgatgccccttcctaagggcccaatcagaaagtctgactgggccctagcaaatcattccttgccaaatgtacatgaatgccagttctaggaagaatgaaatagtaaaaatttgtagaaatcaacatgtcatgtggaattagcttagcacattccagtggctctaggggtccttgtcccccactctcgccttataataaatatagaaagaacattgtccattcaaccctaagacttggattctggctgtgccatgacacctggtagctgaatgtctttgagctcatctttcctcacgtagatgatgagtgaggtgcaatggtgaaggccctctgtggctttgtgatttgtttacttgattatttattgattccattcatgttgcagatgtctgtcgagtatctgctgtgcccaggcaccgtgctaggcactgggggcacacagagtgagtaaggcacgagggcaagttccatccatctctaagagccatgcagactgaggttggagctgcgtgcacagggttatctgcccccagctaccagagcccatttccaagatggtggaaaccacttagtggagtctacactgcagtgagacagatttgctctcagccattgtcacactattaattagcttccactgtgttaagtgccataagcctttgttccagaggaatccaagtgggagaaaaagagcagagtggctggaaggttaggtggtaaggaggcacagaggagggagagggggctggggccagggagctgctgtcatgggcaatgggaagctagcaggggtggggccgtggtcagtttcttggtgggagcaggagctccagctttcctgtggctcagctgaaggttgggtacgaacgggacatagggctgaacagttcacattgttaaaaataaataagttcctcgtttataattctgattaacacagaacatttataaaatacagcctctggaaaagtgacacaaaatgcattacaatatgtcattctcaatcttttaataatgaaaaatgtgagacgcccaagatcaaaggaggcacatgttcagggaactgtttcatctcagagcttgatggggacaggatgatggactgggttttaaaaatggactacctggtcagtttcatgtcttttgacctacctcggtatgggctgttttcctcatgtttataatctagtttaggagctttttcccatcctggctcgttggctggtttgaagcctcactttattcttcagaagggccttggtctgtccaccaccagatgtctcatgtgttatctgacacataccagcttcgtggatatcaaagggggaggattacagggccattgagatcaaaacagagcaaatttgatgatgaaccaggggaaacaggccaagatgtgtccctaatgggcttgttccatccgtttgagtaaattatgcatgggctggcttggagctgccagcagaagcaggtagatctgcctccacctgccaaacccagatccaaatatggaagaaaccacaaggcagccactgactgtggccacaaatgggcacatagtttaccttcactttttgaaaaccatattaaaattgagtcagcactccatagaactgcttgatgaccaccaggccttcctttataaagttctcatgaagaacattaacttttgggaaatgaagcacttatatgactatctagtagagtaggaactacgaacttcttatgttacaatgagagagccattcttattgttttgaaccaagattgagagttttgtcaggccaagaggcagcaggctaatttctcaacctttcaggtgctagaaacacattgtgtcatgaaaatttagttgccccaacgtggtgccctgttgatttttaagtcaagggcaacttcattcttttagtacactgttggaagaatcttgtcctggaggtgttaagattgccttcattaaacatagtcattcaggccgaatgcagtggctcacacctgtaatcccaacactttcggaggccgaggtgggtggatcacctgaggtcaggagttcgagaccagcctgaccaacatggcaaaaccccgtctctactaaaaatacaaaaattagctgggtacggtggtgggcgcctgtaattccagctgctggggaggctgaggtgggagaattgcttgaacccaggaggcagaggttgcagtgagctgagatcgtgccattgcactccagcctggccaatgagtgaaaccctatcgcaaaaaaaaaaaaaaaagaacatagtcattcatttcttcgttcactctcatttttttctaagtgtatacatacagtctttactctgtctatagtctctacacaaagtataagtatttcatttattagaagaaaacattaactgttttggggcccattataatgaatttttaaaacatcacaattttagaattatgattttaaaaaactttactaccaggtacagttttgagaaagctctgggacattgaatagctctgtggctcccaaagataagtcgtagacatcacaataacaagggattatagtatttgagaccttactcatgaattttaataaaaggctgtgtgactcaagcgatttcgtattctgggaaatgttcaaattctgtactacatgcctacattctgcagggttaggctgggaacatagacctttgctgagaatctgaagagaattgctaaggcaactgtgtcccatatcctcaggtataaatcttccctccctccctcccttccttccttccatttgctcatttattcacctacccattgattatcataattctatcaacttttagaatcttgagactttccccaggaaatagatgaggagggggaacccatataagtaaagttgatctcattgggcataattagctcaaatattatatactcttccctcaagaactgagaatgtagggctttatagattttaaaaaatctcatagtcttggcagttttttttctggcaatccaagtcagctggagaagctagggtcgggaaactagttttgcaaactggcagaagtagtggttctttactaagatggctcaattgagtctctctcataaactgttagattatgggcgtcagagctgtttccaaaaggaaacaaattggagtccctctcctcactctctttcgtatcatctaggtaaattgtttaaaattggtctgtgactctggcaggtgtcaaccgctccaagtgactgtaggtttggggttgccctaaagccaaatgcgtagatgatgaaagcattaagaacttctaaacatgagagcaacagctgacgccatctacacggggctgttgggttttttcctctggaaggaagtgacagttggatgcctggcactttcacatggcctattttccccatgggaagttttataaaaatatccattaaggctggtttgtatatgcaacagaagggcataatatgcccctcaaatgaatatcattatctccatccatgaactaaaagcgtttgagggatggcaatgctgtgcaaattccacaaagccacagcttttggcagagctcaactatgtggaaaccgatctcttctctctccccgtctcagtgtctcaaggaaaaacctcattaagcagacaccttaagaagtgtattatcttccctttaaacctccaaaagggagggaagaaaaggagggatgtgagagtgaagctgcctgtgtcatgtccagaagactatctggaagtcttttttacctttctttgctttcttaatcacctcgttgaggttataaagtcacgaaggagactagatttggtagttgttactttaaaacagcccaaaacatttataaaaacaggtttttggggggtaatgaaaaaaaatttaagtcagccacaccgtcacatgttcccttaaatagccacagtggggtcattggtaacatagacccataagcacatgctccatacagaatgggtcatgcagctttcaaagagcagcccttcctcaaggagctgtgttacgtgaatactcatcaaagaaattatccatgccgcttctttctaactcagtgaaaacttgatgaaatagataaaatccacaaagctgtttagcccttcattgaacagcctattttagctggtgcctattttcctgagattatgaaaaatccagttccctctttacaatagtcaccaaaaacctccatttccacaaagggagtaggattgcctctggtcagtaaatggcgattccacctctgggtaggcagaagaaaaggggaagcaataagtgggagggaagcacctataacaggaaaatgcaacttttctagaagtgtctaggagacttgtgttgagatctgactggccagagctatggcctgtggctaccgatagctgcaggagaatcggggaaatgtattttgttagctaaacatgtcatttcaacaaagctcagaaatctattcataaggggaaaaaaaatgaatggcttttggtcagaggcctagcagtgtctgctactggaagggaattcaggcccaggaagtgaaaaccgagtgattctatctaagaagtcaaagtgaacacagtgaatagtttgcatcccatacagatagctcactatcggcagtccacagaaagtgtacattgactgtatctggagggccaaaatttcagccaaacatcttgcctaattattctgtgcatgttttttaaggggaaataaatctgtcttgcagctaacaaaatagccttgagtcttagagtacattttatcatggagcatctgaaaataactcagctctgaagttccatgatgaagttgtcccctggcaatggggtaaaaataagtctttatccattcatcagcacaagtttagctaggctctttcaatgacttagttctagcttatgcatctgctcctaaaacaatattaactcctaatagtctccctaaagaggaactcaaagttctgtagagaagactctggttgactttgatgttcatcaagatgagaggctcttttttgttctcaagattctggattaaatgagctgtcccagtcaatgaaaacttggggcttcaggaacctaacagagccaacccaacagaaaggctaggtgtttgattttcattaaatggcatttacttgtcaacactgtaattcttggaattcaagtgtgtctttaaatatttccactagaagctaatcaaaatcatgattttatccattgaagcatttaaaaatgtgattatttcttctccaaggatctagaaaccctatttcctcgtattctttgtgtttaaaaacatactttgctttaagtttactattgtgaaacctgttataatcaattcaatcataccacccgttttgaccacttagtgttcagaggattatttgctccatttaggaattagaaatcttcatatcttcattagaaccagatttctttgcgaagtctgtggttcttgtagtgggagttaagaggaagcattaaaaatatctgcttcgttcatggagtagatgcacttttcaggacagatccctgttactgatctggtgttttctttgaaaatgtcacagaaacctccaagaatggcaagcaaaagtaagaaatagtacctcctctaggtgcatacgtcccaggtgtgatcagaaagagctcatttgaagcaatgtatttgcatatgtcaaaataatctgatcctctaatgcatttcctctgttaagccatagcaggattttgcagctaaattcagagagtcagcaagaagaaaagggtctttaaaaataagttgaggctggttgcagtggctcctacctctaatcccagcaatttgggcgtccacggcgggaggattgcttgaggccaggagttcaggatcagcccgggcaacatagtgaaactccatccatttaaaaacaacaacaacaacaaacagctagccatggcagtagctcttcaggaagctgaggcaggaggattgcttgagcccaggagttcaaggttatagagagttgtaatcgtaccactgcacttcagcctgggtgccagagagagaccttgtctgtcaaagaaaaataaaataggttgactaacagtcataataaccagcagccttcctgcagactcttcataaatactgagttgtttataattaattgtttgcaagcaatgaccttctctttctgtaacctgagaaatgagattaacaataacagaggaaagccaattacaaacagatacgtttaccatcaaaattttagcccaacagggcagatcagaagccccagatggctcacttcttttcatctgtgcttaagaatgcagtgaccatataacaaagaatttaaaaattaattgtaatgagagaattgacccatggtggttaccttttcttaggaccatggttttcattttaatgtggaaaactgacatcccctggaaaagtagatattagagtaacacttgttgggtaattaactcaataaacaagggaactgacttgtattagtccattttcacgctgctgataaagacatacccaagactgggaagaaaagtaggtctaatggactcacagttccatgtggctggggaggcctcacaatcatggcggaaggtgaaaggcacttcttaacacggtggtggcacgagagatgagaaagaatcaaaagtggaaaccccttataaaaccatcagatcttgtgagacttactactacaagaacagtacgggggaaccgcccccatgattcaatcatctaccaccaggtccctcccacgacatgtgggaattatgggagtacaattcaagatgagatttgggtggggacacagagccaaaccatatcatgactcttcccaggaaaccgttgatttgtgagttgaatataggctctgctgcttatttagttttttctcccatttcctgtaggacagacattaggacagtttttcttctctatcttccactggtcatttctttggtaaaagaagttgaattgctccttctttgtaccagaatgcctgtgttatcacttgtagcaatagaaattcacaaatgtaatcagatgaaaggtctagaattttcctcagtggataacaatgtaagtatcacttgattattccatccttaattactgacctcagccagatttttttttgcctgaacttgatgtaggcttttaaagagacaggtacacatcagcgggcaatagatttgtttagagaccttggaagcctgatttgcaaagtaacttcatgtaatggtgtgtcacccacgaaggaatgggtggaaagctgcagcttgggttaaatgtcaccattgtcattatcttcagcaaacatgtattgagctcccaggagatatgcaacgtggtctctgatctccaagagtgtgccgtgccttgggagggaatgcaggattcattcgtttgacagatgttcacaaagaacctgcttgatgcagtggccctcttttgggtgctggaagctcaaccatgagcaaggcagatcaggtccctgctacgtgtagaatttacattttaaagaaaaagttgaatttaaacaaaaatggaataagaaagataaagctaaataagaaataagataacagaacaaaagctctggagggcccctttaaccgagagagtcaaggaaaacctggaggagtaggaggcaggcacagttgagttgagccctgaatgacaagtgaggcatcctcctgaagagctggggtgcctggctccaggctgatggacagcaagtgcaaaggccctgaggcaaggaaatgtttaaaacctatgctgagaagaggtgaagagaggggagagagggactttcctgaccagggcagggagtagggggctgtacccaaagacactgaggaaaacttgtagggtgtcatcaagttgacagagagtcctgtggtgggaaaagagactgaacaattacattgggtcaaatggtagccggactaagtaggcactggggagtgactagaggtttttgagcaaaggagtgatgcatgccagtcagtgaatcctgaagagttaatctgactggggtagagtgtggcatggggaaggaagccaccgagaggctagatatggggctgtaaggcctggcttagtctggtaaagtggggttagcatgaaagggccagttcaagagacattgccagccacatggacagtttcatcttggccagttatctccagactctgaaactctctctcagtctgtttctactattgtagtactttggggaaggagtagggagaaaaagatcatagacttgaacaaatcaggtgccactgggcagagggttctaaatttgcactctccaacacagtagccactagtcacctgtggtgatttaaatttaaatgaattatttggccaggcgtggtggctcacacttgtaatcccagcactttgggaggccaaggtgggtggatcacttgaggtcaagagtttgagaccagcgtggccaacgtggtgaaaccccctctctactaaaaatacaaaaaattagccaggtgtggtggcaggtgcctgtaatcccagctactctggagactgagggaggagaatctcttgaacccaggaggcggaggttgcagtgagccaagattgtgcctaggtgacagagtgagactccatctcaataaataaataaataaataaataaataaataaataaaaagaattatttgcaaataattgcatcattagaaaaaaattataaatgaattaaaagaaatttaaagaattcattaggagtcaccacatttcaaaggctcagtagtcatagaaagctaatggttactatattgaagagtgtggataaaatacttccctcattgcagaagattctgttggacagcattgggctggatcacgaattttctgatgaacaaacccttcatctttctatagatcacaagaaagtctcccatggtgttttatatcacgaactactttgctgtggaaacttctgtttgtacagaacgtttcctcttacggataccaattaagttctttatgatattacattggtttggctgtcaaatgttgtgtgcttaacaaagaatgatagaaaaatcactttccagaacagaatgtttgaattgcatgtagcatagaaactgagtaaaaatttcagcctgatttaacatctttggagtagacttcttaaaggagagggatatgaacactgtaaaacacaaattcatcagaagtgcaatgacaacagggttcctctctactctgctggtgacaaactttaaaactctattgacttgtatctcttgatgtcattctattcccctctagtggaattaaaaggtatctgtctttctactccagcttggacacattcgcagtagtaggaatagaaatctagagataatgaagatagaagatagcattatcacttattttcatatcatgataggctgctgctttacattttaccctttttcctgtcctcaggggaaaatagccttctgttctctgtctatttgagctacttggagaaaaaaagtttaggtatctatcctatgtatcactatttatcctcataccagaagaagccttattgcccaatatgttactaggatgtgccattggttcagcgtctagcacagggtcaggcccgttaattgagttagaggcatgggttgaggtcccgattttaccacttaactatccatggcttcaaattcaatcatttactttcctgaacctccgtctcttcatctttaaactggagactctcctttgactctccatggtcgtatcacaagataaaaggaaataatgaaacctcattgaaagttaaggtggactctgcacatttatgtggcctcattccccaccaccaccactctgcccccagcagcatccttttaggaaagatggataaacaggtaaactagaaatatgtttccgaactctctgcgtacaggtgaagcatggtggggctggggctacctttaagttggttgcaagagcccaaaggctaccatttggtttggttatatttccttttttcttttgtcttcctctttttcttttcttttttttttttgagacagagtctcactctgtcatccagcagtggcatgatcttggctaactggaacctctgcctcccaggctcaagcaatcttcccacctcagcctcccaagtagctgggaccataggtgcacaccaccatgcccagctagtttttgtatttttttttttttttttgagacagagtctcactctgccacccaggctggagtgtagtggcgcagtcttgactcactgcaacctccgcctcctgggttcatgccattctcctgcctcagcctcccgagtagctgggactacaggcacccaccaccaagcccggctaatttttttttttttttgtatttttagtggagacggggtttcaccatgttagccaggctggtctcgatctgctgacctcgtgatccgcctgccttggcctcccaaagtgctgggattacaggcgtgagccatcacgcccagcctagtttttgtatttttggtagagacagggtttttgccatgttggccaggctggtctcaaactcctggattcaagtaatccacctgtctgggcctcccaaaattctgggattacaggcatgagccatcgcgccctgccattttttcttttaaatgttgagttattctaagtttaaagtggctaataggagaaacaataatttggaacattagcagttacagtatttctctagtctcaaaaagagcattctcactagaagtatccacagaaatgcacttaaatgccacatccctccctctcccctttattccagccaccatgtcataacctccctctgcagagcagagaattaagctctaaagactagacatttgttgtggcaaacagtgctgaatttctgcctttattttaacacaactgtctgctacatgtagaaatattagcatatttgcagagatattttcattaggtatttgttttgctttaaaaaacaacccagaaaggtgaatttcaaatgtgcacagtaggtttctgccatcctaaaggcaaacttcaaaattttttaacagctaagcaaaccatgccagtgggttaagatgtaggattggaagtctctgatgctgtcctggggcgtgggggttggggggaatgtatcaatgagtactattttggtcattattcttcaggttgagttctgggaggcattgcttaggacacatttaacgccacaagggaaagtgcattagtgttgccttctgttgtttaaagaaaaggagggagagagggaggaaggaatacatgcatatgatacttttgcatgctctgtgaccaccagcacacaaacaaatgcagagatgctgagaagtgcaaagtgagacgtggaagggcaggtgctaacagacaatgcagctatacttgtgatggtgcttttcacgagtgaagaccaaggtgtaagtgtcttttacccagtcacagctataaaaccgaatccagtggatcaactaaaactaagtgccaaagaggccaatagcagtctagaactacgtgtgagtgtgtgagtgtttcttctggcaggttctcctgttttacggcttcctaccagccatccttaactaacgcatggttggaaattcagtatccccccccaaaaaattgaaccttcatagtttcccaattcctggttttagaaaaggaatgaaggggtatcaattagagatcaagtgcatctttgaggagagaatggcttgctacaatcgaagagaagaaaacctcagctatcaatttgtggaggctttgagcagtcactgagcagatggggttgatgggggtacctaactcatgcacggccaaatgcccaagcctaacaaaaacggagaaaaaccaaggattaacatatcactttttagctaagatgtaaaactggttactggcaagcttattccagcaggctcagcaagcgtccagcacaaccacaagcagcttgatcaaaaacagacctctgcctctcggtggatagcttttgcttttaatattttatgttcacctctttggctcaagatttccacttctggcttttatccttgggaactgataagacacttgcacagtgtgtgcttatagatgctcatggtagtgttattcataacagtgaaaaacaaaatcacctgaatgtttaggaattgggggttgattaaatccatcatagtgtgaatgtatgatgaaatatcatacagtaagatgtgacactgatttatatttaatgacatggaaaaatgtttaacataaactgttagattttttaaaaagctacctatcagcctctctctctttttttctctctcatctttcttgaatgaaatccaccaaaatgttaatgtgtatatacttctttctacttaactaccttttctaattttttacagcaagtatggttttacctacttaaaagaacacgtgacctaaacaatagaaaattagtaacaaattactagaatactattttaccataaactgcacatttcgatttttaaagtgaggttataaccaaaaagatcactgaacatcaataaataaaattggctgggcgctgtggctcacacctctaatcccagcactttgggaggccgacgtgggcggatcaccttaggtcaggagttcgagaccagcctgaccacatggagaaaccccgtctctactaaaaatacaaaaaaattagccaggcatgttggcgcatgcctgtaatcccagctactcgggaggctgaggcaggagaatcacttaaacctgggaggcagaggttgcagtgagccaagattgtgccattgcactccagcctgggcaacaagagtgaaactccgtctcaaaaacaaaaaaagaaaataaaatttatcttaacgtgggtaagaggggttgctgcttgggaaatatctactggaagtaatgaggagtcagggtgaagttcggaggtacctaaagagacagtcctgccgatttggacttggcagtcgagaaaaagacatggttacaccttctgcctcctctgtgtgtttaatagatgaacaaataccagctgctggggaatcttatgacattatagtgaggcataaaaatcagccctcttgcaaataatgttatactatttgaacttcatgacaaaaatgagtgcagaatcccagtcatgttagctccctactaccaaagagtggacttcaaaatttgacccacatcatcacagaatagcagacagggtacctcacacaatgacctgatcctgtttttactaaattaaaatgatgggatcttgcagactctgaataaatgtgtttttgtttatctctgatttgttctcagtcgtacagacttggccatgaattcttataggagacttaccactttgtacagggctggcagaggtttgcataatttagatgcttcttgtattcctattttacgttcctttccaactatggtattggaactaaccaagtctgtaattagcataaacattatttggtgctaaaaaaatggtatcacattttaatagaggatagatcagtggttgtcaggagttaggggaggggagggcatgactataaagagggtggcatgggggagcttctttgtggagattgggaagttccgtatcatgaatatgaatgtgataaaatttcacggaactacacacacataccctcctatacaataagcacatgtgaaatccttatacagtctgttcatagcattgggccagtgtccatttctgggttttgatcatgtgctatggttatgtataatgctgttatttgagtaagctggtgaaaggtccatgggaactctctgtgctatttttacagcttgtgagtctaaaattatttcaaaataaatgttttaaataacatttttttaaaacgtgagctattcctcaaaagattactattctcagagttaccataaagctagttaaagtagtcagtacccccaattgaatgggcaaagaaatacaatatttgaatgactttttccttagaggaatcagtatgacaataggaaaaagaaaaataatgatttatccttgaaacaaaaactggaacaaaaacatgatttaagtatatgtgtaagtatgtacttaaatactaagtagataggctagagaaagacatacaggaatatctgtggaatattgtattattgccccccactaattgttcccttacctctctgatgatcataggtcctacccattgctatgtgacttgtagcccctccctggatgcagagcatccccaacctagggtcagtcttggccaaagggagtgaagtttagctgcttcaagaagcattgacagactgtcgttcagtttcacctcttgcttttcctttcctctgccatgagaatggcatgtcccaaatagcagctgttccttcatctctaggtcctggaataagtagacaggtgctccttctctgaagctcctgatatataacatgagtgagaaataaacctaggccaatgagattttgaggttgtttggtactgctttgttgctgagctaaaattacatctacaaggtggacggtttcattgggcatcaccaacttgaaactactttcagttgaactcaaacctacaagctttcaaagtttgaagtcctaacccatcctgtggctctttaccaaataatataaaatggcagtagatactaagctttctgagggccattgtagattgtgttattatttaaaatatttgctgtccccttctggggaggttattacacccggccctgttgacttccagattggccatgtgccttgctttggccagtgacatgcaaacagaaatgatgacaccatttccaagcaggagatatatgagccgttgagtactctgccatttctttttttcctctgctgtgagattgcatatgtcctagatagtgactgctaaagtccctaagtgaaaagtgagataaatttttgttgtggaaagccactgaaagttagaagtgatttgttagcagtataatctagtctcttcattccaagttagataggacctgagcctcacctggagtcttcacatggtgggcacaccacctggcacatagtaggtgtacggtaaataattttttttaggcaaaatgaagaaattgataggtacctaggaaataaccttatttataaatgagttatgtttagggtttgtgatttgaatacttacacattttaaacatcttatttttattactgttactttagagacagggtctcactatgttgcccaggctgaagtgcagtggctattcacaggcatgatcatggcgcattacagcctcgaacacctgggcttaagcaatcctcctgcctcagcctcccaaatagctgggaccacaagcatgcgccactgcacctagcttatctttttttaatatcagaattccatattaaaccatcagaggtttttgaaatttaaaagttgtgcagggtgactataatcaataataactacacattttaaaataacttaaggagcataattggattgtaactcaatggataaatgtctgaggggatggatactccattctccatgatgtgcttatttcacattgcatgcctgtatcaaaacatgacatgtaccccgtaaatatatacacctatgtactcacaaaagttaaaaataaatttgtttaaagttgattgatgatggagcaaaaactggacataaaacaatgtcttgagatgttaatgaataagatatattatgaaataggaagatggtcttaataatagcttttcattaagagttgtattggtggcttgtggtgttaaatatcttcatagtgccttcatatagacaccttcttctgcagattggtagagaaactgccaacaaagcccctgtgtagtgagatgaggtggttgcgccccagttcctccagcatgctaggcttttcccccaatggtgtctcatgaagcagccggaatatagccagtgtattcagctggacttcgtggtaatttgggttacatagataatgtatggatttattttttaacttaaatcttttcagataatgttaaaagtctcattttactttcatgtctgaacctaatctgtccccacactttcccagagtcatttacttatttatcaatctagaaaaaaactgtcttactgttcagaggagggggctttttgttttttgtttgtttgttttttgttttttgagacggggtcttgctctgttacccaggctggagtgcagtggcatggtcagggcttactgcaaacttgacctcctgggctcaagcagtcctcccacctcagcctcctgagtagctgggactaaaggcataggccaccacccccagctaattttttttttttaagtagagatgaggtctcgttatgttgccccagctagtcttgaactcctgagctcaaacgatcctcccaaagtgcttgtttctgttttttacataaaagtcattatattttatgtcttgtgttgtggcttgctgttttcattagacaatatatcttagagatctgtccatgattttacagaaagatctagctcatttgatttaactgccatggagtattccatagtataaatatattacagtttatttagccattgccttgctgatacagatctatctagaatttttaaaataatttattgcttcccattgaatgattacagcatcttgcatagctgggcaaaggactcataagaaacctactagcaaaacctggtttgacaggttcatccaactgtatagatgagtgttattcaccagaataaactgaagtgttacattgcagatcagaaattaatgagcatcaccaaaaacggaatttctttcgttctttcttagaaaaggaaacatccaacaagatcagtatggtcagaggccaagtgcgatcctaagcccaaatggagagtgggccaggcagacccagccgcctgagaaggggcatggcagctttactgagtacatgatacacaatgtaataattacagtggtccccaagttacatgcaaccaccctgatcatatgacttggttttggtaatcctctcatgttaaccaaaaaaattttaaataggtctttttttatatcatagggttaaaaaaaaaactgcttcctacttccctaaatttcttaagaaatttaagatcgcagtaatgttgctagatttgcccttgaagcagtgttttgggtgtttctcatatagtcagcatgtgggtgacatttagacccaagcttggcttacaagcatgattcatgagaacacatcagatggtgacagcagagaatttcccttggtacttagaggggagcagcttcaaggaggcatactgctctgactgctggaggaagttgcaccgcagagcttctgttggttaaaaacagtcttttccagaaaccctgaacccccagccctcaatgacagatagtttggtccttcaagagaaacctatggggcattttggaggcattcaaatatgggtggaaaattcaagccaggatgacctctaaccaaaaccctgccattattttactcattgcattaaaagcacatgtgcagtgatgtcagttcaaatatgaacatccccatcaaaaaacatcattggttgcctgcctcctggtgtgaagggagcgttaactcctctagagatttcacactgcacatagctagattagtctccagcctcaactactgcctttgcagacttacctagaatatgacttccaggtggctgtagacacaagaatgcatctaggaaatgtgatgcccggtcagcatccgaattctgcacagtgtagatccatgtgtttattttaacatattgcaaatgatagcggtaatgatgatggtgataaagagaaactttggaaaatcttggtagaaatgttgagaaatgtttccaaggaagactaattaagttgctacattataaaactaagaaatgagaaacaggccagcggatgctttcaatagaatttgaatttttcacttgtcatttttttcctaagaggtttagatttagatttgtaggttagactttattcatgcctatgaaaagtgattagctcaaagccttcatttttttctcccaaccacatatatgacagaagtgtctgagctgtatttttccctctttcgttataatataatgtcaggcttgtgacatatgacagcaggtttcacactccacttaatgacaggctgccagttcctggagaactaaaaaggaagactaatatgtatttgactaaaaaggaaaatgttattaacttggtaatagtgaagacttggtgtgcaccagatatttctttgtggccctaagtctagccagacttgctgtaacttatctgtgggatgactttatctacagccctttggtgcacagtgataaaagtgtgctttgttaaggatttagtagttgctttcatacacatttaatgaaggtctaccatgtaggagataaaatgatttcagaggatacaaagacagacttctgcattcaggtagttttgcagttcaagaggaacctattaatgtcactttcctctttttaccttggtttccaggaagctcagagataaagttaatacttaatcctcagttcggcagcatcctttaggacctctctttcctccctgttagactgtcatgtcagtcctctgtgtgtgggaggtgagagataaatgatgaaaaattaaaggggaggtagacagaatcataattatcataagtggcagaatatgttaagtggcatgcaaaagacagaaataaaatgctctggaaggtcagatgaaggagagaaattgtaactggtattgacatctggagagacttcctggaggaggaaggagactttgataatgacttttcaggtgtttcagcaggtggagtcctggcaggtggaggcagcagccgaaatgaagacacagatgagagacaccaaggtgcctgccatctgggactcaccgaagagaaagatcagatgtccaggtttatagatgtaggaaaggatcctgaggctgctctgatcatttccatgatgaatttgatgaatttgatgaatttggtagctatcaggagacctactcttgggccagtgggggcagcttgtgccctggtattgtggtgttcaccttatctgtccatccaggtcacaggcatcacctggaagccgcaagccttacccacctttcaatccctcatggcccaggctggcgccacattttgcctgagctctcattctgcctgtgccttgagatgattttgttttgaaaaacgggtcagaaaggtttggaaacagcagtgtgtttcctttacttagagaaaagcgtcctaattctgcttttcagataaatctttagactcatcctcccacgactccttaacatgagatcagcgggttatatatttaatgaagaagtaaaagatgttcctttggtgctgttctacttgagttaatgtatttcaccagccaatactactgtattccctattcagtaaacagtatatttaatacatatgtagtacagtaaatgctcttgcattggaattatgcatgtaaaatctgatgaaaccctaaactctgtagtttagttaatggtattgtagcattgtcctgggtctgcaaatgtgccgtggttatgtaagatgttatcactggggaagctggatgaagggtatgaaggaacagtctgtactatttttgcaaattcttgtgagtcttaaattatttcaaattaaatagctttaaaaaaaaaagaattaaagagatgatctagtccggttgttttcaactttaattttagcagtggtctccctcttctgccttctcctgcctccatcctcagcatccttaggcaccacctgacgttttaaaaatgctgatcccacccaatacatttaggctccagatgaggaaatcagggcccacagaagtaaaatgcatcactatttagaggctattgatagaaacacagtgagcctggggagtttttaggacgagttgctctctgcagatcttcatgactcacagctctgtcgctaacactgtggtttcttttgtcagactaggtgagattaattagactggaaaagagtttccatgctcctgcatcccattgctgcagtgcaagaaatggcatcatccatataattgagacagtgcaagaggtggtttgggttagcagacagtttaacaaaacaccactcagggcatttgccaagaggactggcttgaaagtccaggcatggggtgcagaagtcgggaatgcgggacctaggaggaagtcccttgacttctgccagcttggccttcactctgaccacctatgaagcctgagggtgattagcccagaggatagggagtcctgtttcctccccatccaggcccaagtcactaaagtattttggggaaaccctgggcaccttgaagtttgctcctaaggataatgtaataataattgcttatatttgtctaaggattttcaggttgcaaagtctttctcttatattccctaagctgggtgtcaccccttgcccatgacacgggcagattggttttatttctgctttataaataaatgacgtgacttttccaaggtaagagcttgtgccgggactggggtcagaacacaggtctccacagtcctgctaagtgctcttctcataggagactctcttgttctaaacaaagatcctggttattgtgaagcacctgtgcacaattgctgatcaacaaacagctggtgctattattattactgtcgttgtaattcataggcaggatctttggccacatgtaattttggggtgtgacaactccaagacttgctggttctccagacttaggcaggaggtggaagcgatggtttcctctcttcctacacctccaaacggtgagaacctgaaggtgccatatggctgttgcgtgagtaagccttaggttttcctgaaaagtgagttgcctgtgtgccacatcaatggagatctatgtgacaaccaactggtatgacaaccaccctggggctgcctggcatgcacatactcctgagggctccgtgcgagctgccattctttattaatttagtgccatttgttgatgcctcgtttctgcagggaaaactggttccttcatttcccctggcatattctgcgccctccgcactgtaggacgcaacctttcctgtcaacacaggtatttttaattggtgctggcaccaacctactccctgaacattcttcctgatgtcctgggatcctggcaaaagtggtgggcttccctaatggtggaagtctaaggccatacttcagaccgtggacccaactactgctttctagaagaaataacctgtcaaggaagatgttgatgtctcacaccctgagagaaacatttaggaggtaaaccactgacctgcctcgaggatatcattaatcatctacacatagaggtgctaggtactcacctcgcaccagtgacacacttactaaatatttgttgaatgacctcctagagcagtggttttccagtctttagtgtgtccgccaacacaaggatcactggcaggatctgctcaaacacagactgtgaggccccacccccagagtttctgactcggttggtctgggaaaggactaagtactatgcctttctaacaagttccaagtgatgtgatgctgtgcgggaaccatgctctgaaaacccttgtcctaaagcagggcttggcaaacttttcctaaaaggacccaaatagtaaatattttagattttgtggcccacacagtctctgtcataattactcaactctgccattatagccaaagaaaatatgtaaataaaggagcatgtctgttttccaataaaattttatttacaaaaataggtggtggacttgtttctaaaatatatatatatatatgtgtgtgtgtgtgtgtgtatatatatatatatatgttgcaaatataaaaatgcgttgtaaatatattgagagccagatcctcattctgggtagatctccaaaagctcttgtgatgggaatccaacgttggtcacatcgtaggtctgtgctctctgaagcagcacaaatacaaaacttggagtgaaacagagatgagcgttgttcctgtgcaaggatcacgtgcaaatatgtgaactgtttcatataaaaaaaaatctgaggtctgatgttcatcaaccatgtgatttggggaaggtcattaacatctctgtaaaacgaggataattaggcagtaaaaactaggggaaaatgctcatttttataagttctgggtggtgcagacacgaggggtttactattctttatacttctctgtatgattgaactatttcagaattctcaaatctgtgtctttaaaaagtagtcataggccaaatgctttgggaggccaaggcaggtggatcacgaggtcaggagatcaagaccatcctggctaacaaagtgaaaccccgtctccactaaaaataccaaaaattagccaggcgtggtagtgggtgcctgtagtcccagctactcggggggctgaggcaggagaatggcatgaacctgggaggcagagcttgcagtgagcagagatcgtgccactgcactctagcctgggcaacagagcaagactgtctaaaaaaaaaaaagtcataacaagcctttggcatatatgtggcttagggtttaggttccatagtcaaccaaaagatgaattatcttacagtcagaatcacctttggaattccccgaaatcaccagcaccaaggccctcagaaagtcagcagccaagaatattctgctttatgtcactttgcattggagaaaccctgagagaaaggttaattcaagcttattatgtctacagtagatctctggatctcctgcccttccccaaaccctgatcttctaaagtcttgcttaattcagtggatggccactctgcctttgcagctgctcaggccacaaggagtgattcaagaggaagaacttaataggaatgagtcctgataggtacatgttgaatatgaaattgttttatagttccaatagaacagtagagtctatggccataccaccctgaacatgcctgatggaaagctaagcagggtcgggtccggttagtacttggatgggagacaaatagatcatctaagtagaagctcagagctctactattatttatttatttattttttgagatggaggctcgctctgtcgcccaggctggcgtgcagtggcataatctcagctcactgcaacctccacctcctggactcaagcgattctcctgcctcagcctctcaagtagctgggattacaggcacacgccaccatgcctgggtaatttttgtatttttaatagagacagggtatcaccatgttggccaggctggtctcaaactcctgatctcaggtgatctgactgcctcagcctcccaaagtgctgagattacaggtgtgtgccactgtgcctggcctacctttatatattaataaacagaggaggctgggcgcggtggcgcatgcctgtaatcccagcactttgggaggccgaagcaagtagatcacctgatgtcaggagtttgagaccagcctgaataacatggtgaaaccccatctctactaaaaattaaaaaaaattaggtgtggtggcaggcacttgtaatcccagctacttgggaggctgagacaggagaatcgcttgaacctgggaggcagaggttgcagtgagccgagctcgtgccactgcactccagcttgggtgacagagtgagactctgtctcaaaaaataataataataaaattgaataaataaataagcagaggccccagaagcagaggcgcttatctgcactacctgcgtggtacctacctaccctgtgatacggcactcttctaagcattttacaaagactgactcgttttgtccttatttatagtaaccacagaagacagatgctgttaatttcccagcttatagatgaggcagaaaggataagtaattcgtccaaggccatgcctctgggtagtagcagagctggaacctgaacccaggcagtgactccagaatctacgctctttaaccacgatggtcttctgtatatcatttttcttccctatccataatctgtgagttgagggacaaaagcttaaaaatctaaagaaaaaagatgtctggttgcacctttggtgctctatgtggtatgctagagaaggtaatgaaattgcagtgggctatggggaggcgtaatttcagtgcctttacgattttcatctgaccatgctgagtttccctataaaaagcataaaatactttggagatggtgcagaagcaggaaaatgtacctgtcagtttggatgtagatctggtttcgcagtgtattgtatttctggatactctgtccaagaggagatctcctgaatgatccatttagggttgttccgttcacttcacaaacacaccgattttgtgtctactcgtgccccagcctgcgctaggcagtggggagacagagaagccaagttgtttaaaacactgtgcttgtccccaagggctttggtgaccatagctccagaagtaatagctttggtggaaaccgtggtatgtgcaaatttcaccccataaatagaggaaacataggtattcattatattaaaacatgatgcgggccaggtgtggtggttcacgcctgtaatcccagcactttgggaggccaaggctggtgcatcacctgaggtcaggagttcgagaccagcctggccaacatggtgaaaccccatctctactaaaaatacaaaaatacccacatcgtggtggatgcctgtaatcccagttactcaggaggctgaggcaggacaatcgtttgaacccaggaggcggaggttgcagtgagctgagatcgcgccactgcactccagcctgggcgacgagcaagactctgtctcaaaaaacaacagtaaatatctaaaatatttagtggcgaagtcaccaccacccattgtgtgactccagagaatgatgcacagtctggtgttatcgaaccttgacttggggctggggagtggtggggcctgagcttggcttaatctaaaaacgtggtcctttcatgactaaaatgagcattgtgcttcttctcctcccaggaccccaggagcaagcacaagttcaaaatccacacttacggaagccccaccttctgcgatcactgtgggtcactgctctatggacttatccatcaagggatgaaatgtgacagtaagtaagttttcttttccagttcatagcgaggctctgtagctcatgctcagggtttgctgagcaaggaaggctcagtaacttttcaacaccaactcttcagtagagggaattagttcagatatctaccagactgacaaagtgtagattcttccactgtcaaagttccaggttattgaactacttgattgcctcattatgaacccccaaaaagcactcgatttataaatgaggttggtgggtgctgtcactttttttttttttttagtggcagaagtcttcaatcactgtaaaatatagcctagtcaaaccccaaagaagacttccaccgccaggtccacatttggttatagcttcaaaataagccaagaaaccctactcattatcttcctgtgtctctaattagtgggtggactgtggaaaaatccagtaggctcttcttaaaactgaaaccaaaatgaacataaaaaccagaatagcatcttattgaagttcactgacccagcatgtttatggacggatcaaatgtgtattagcctggctcaaaacgctgaggaccactgacaagcaagacaccagcccttttctgttattttttgttacgtgtgtatctccatcaactaccaggaggaaagaaaagcaactatgaagactctttgctttgatcattttttttttttggagacggagtctcactctgtcacccaggctagagtgcagtggcgcgatgtcggctcactgcaagctccacctcccgagttcacaccattctcttgcctcagcctcccgagtagctgggactacaggcccccaccaccacacccagctaattttttgtatttttagtagagatggggtttcactgtgttagccaggatagtctcgatctcctgacctcgtgatccgcccgcctcggcctcccaaaatgctgggattataggggtgagtcaccgcgcccaacctgctttgatcgttcttaaagtatgagattcctcaggctatgtttgtttaaatacaagctgatacctttaggacatgaaaagttaattgccgagcctgtttttctaatagatcgggaaccactgtggaaatatcagcctattgccatttgctaatgactattttcatttgctatgatggccagaagctgatatttgtatcttacatggagcaaactgtagaaaaagaaacataaacgagcatcatagagtagatggagtttctcaggacacagggattcttcaccttacagagttgtacggcatcacaaccaaatgcaatgtttgtttacttcaagaaacgctgggatttccaccatttaatcccagcactttgggaggccgaggcgggaggatcacctgaggttaggagttcaagaccagcctgaccaacatagcgaaaccccgtctctactaaaaatgcaaaattagtctggtggtggtggtctcctgtaatcccagctactcaggaggctgaggcaggagaattgcttgaacccaggaggcggcggttgctgtgagccaagattgtgccattgcactccagcctgggcaaacaagagtgaaactcggtctcaaaaaactagaaaaataaaaaaaagaaaccctaggattccaaagacatggttttcaggggttctgcaagggcttacaacttaagtgcatatgtaaatatattttaactactttaaaactgggaacaaaataaatatttgaatgtgttacatactcaaccttcactccttgggcagaacttgcaatcaggtttctcctacagcatcctcttcactgaagagtcagctgggatggggaagcatgccgttagacacggttcctgtttgtactcagttttctgcatgaatgaggatttttggatgctgtactactttaacataatgcaaaaataaatgagatgtggaggctggtctgagacatcaactggtttcaaagttgtgtttgtatcagagggctttattggtgatccttgaatgtctttataataaataagtggtataaatttgtgtttgttagctgagtttatgctaataaaataacactcatatggtttacatcattagattctgctttagactttgtttgcaaaatggtttccttactaaaaatttttgaaaaccgctgacctggaccaatgcttttttgtttggttttgttttaaactctttttcttgggaatcataaggcttctgtggctgccgcctgtgctcctttctggagacaggaggagagcaagccgatgagcaccaggactgcaacccctactgaccttaacttctgcagagaagaagcctcttcctgtgcccttccacctggtgcaattgcaatcctagatagagttccacttgggatggggcaggacgtcagggggcagttagcaacaacaacttgagtgggccaacctctcactttgtagagttggaaatgaaattagagcaaatcagcttcccaagatatacagcagagactgcaacacggcccagtgcactttcacctcccgtcccctccccgttgcctctgtgctttccagaggctctggcatttactgccttcacattgcaaattttgcccggacacttaaagacatgatgtggttaacacaagcaatatacataacacagcttttcaagagcctttatattggctaaattcgaggtgtagaattttgaacagttagccttggaaatagaagcctaatagcatccacatttgtgaattagctaattgttctttcctcagtatgtccatcattctgctgtcagtgtttaatcggagcagtatacattattcatgatgctttttccaatttactttgtcatgttaaaattaaacactcaaaatgaaacggaaaggaagactccaccttgatgattacagaataaccttattagcatcctggcaaggatttgcaaggattccagtggccttccctccttctggaagcctaaaggtacaagggtgatcgagctggaacacccacacacagtcttctgtttgtttccggcacacaggattcttttcagggtttctttggttcattgcaataatactgatctttttttatcctccccctgtctcacccacataatgtcagctgtaaggaatggctgatcatgctaggcgggtatttgttttacttggaatggtatttaaatatttgaagataggtttaaaatatcaaatacaggttctttggggagaaaaacacaggcaatgtacttaaaccttgttgaaaatacaaggttagctgaggaaaggaaaatttaatgaattttctatactcaatccacagattttcactctttctcagtggtaagcccagaatgacataaagaattcattagcaaaaagtcttatgttcaagctgggtgcagtggttcacatccatagtcccagtactttaggaggcctaggtgggaggaccacttgagcccaggagttcaaggctgcagtgagctaggattatgccactgcactctagcctgagagacaaaaggagaccctgtctgaagaaaaaaaaaaaaatcctctgtttaacattttcatattattttgcctctgtgtacataaaatatgaattaggctgagctttgtacatatttacctgtgtgaattttgtatactgttaaatacttgaaacaatcacagaagcccaagctgggatattttgcttcagtgaagactgagcaaatatggtatgagtattttaaggatattgtcactcacatgaagcctgtgctgtacaggacatctgctaacagttctttatgtcaccaaaaacattatagcaaagtatcgagttgggggtaactcattttcacttgtgctcatgcaccaaaacactgaggagcggtggttggagtccatatgcccagctcaccctctcctttcttgattcacagcctgcgatatgaacgttcacaagcaatgcgtcatcaatgtccccagcctctgcggaatggatcacactgagaagagggggcggatttacctaaaggctgaggttgctgatgaaaagctccatgtcacaggtaaggcttgctcatcccggagcagcatcgtgggcaggcatttggatgaaggttacactgatattaaggcagggtgggggctgggctggatgccctgaggcctctggagaggcagtcgccctggtggagccatcactgtctcagagccctccagccctctgagccctcgggttaatacacctcccaggagatgggtctgtacacccaaattcccaaatactcaatgtcacacaaagtcacaagcactgtgtggattgggctattctgacagcatggcccgtgtactctcctcccggtgacagggggtcaggggagccaattaatcaaaatgctgttggagggaatggaactagaacaaggggaggcgaatggatggatgacccaggtgttttgtggcattggcctgtgatggcccaataaatccacctcagcgatagcaacagccgttgagtgcttttgcttcctctgtgttaggtatggtgctaggaacttcacatagattagttatttagacctgacacctagctggttattagcctcgttttccagaaaaggaaactgaggcacagagagatcaataacttgcagtgttacagttagtgaggagctgggataggaatggaggcatttgactccagatactgtgcttataattaccacacctcctacaaacagcctggctatgggaccggaattccctatccaggggcctggttactccctcctcggggctgtttctgggtgggctctgccacaacatggctttttcctgtggttttcccaccaaatccactttcggttcatcggcacactcagtcaagttatcctggagtcttattggcctaggacccatcccgtgtcctcaagatggcttgagttctcggtaccatgacccactccatgttggtgtatggttcagctctcaggcatcagcctatttccttgcacttgggggtccctgagggaccaactgtatacattacccttgttgacaagggcattcattttcatttgatcagcaaaggtatcttccttctgtatctaggaatttgaagctatcataaacatggaaagactgatgctaatctattaggtttagataacagaaaacatcatagaagaagggtttaggaggatctgttttaagaaaaaaaggggaaggtggggacttccaaagaaaagcttacctttggaaacatcctcaggtttttcctttgaaagataagcaaatgttctaaccagggctgtcccctcaggtaagaactcagagaagaacaaaggattccaaggtatcactgggagagggtaacagtttgcctctggataaccttgaaaccagctatagctgatggtcaaaatggaactgggaatgaaatccctatcatagatacagaatcccttctgactttttgtagtttttagagaaattcttttattttctcaagaccatccctattgtgccattgcctttggggctgtgattgtcacctgcatttctttttaatgggctgatgctgtccttggaatccctgcccttatctgacagccagggcccctctgactgggcactgatgctctctgcccagaggaagatggtgttcctcgggggccatgagctaggccatgagacccctctgcaacatcacagctttgctcttgtttctctttcctactaaggcttccacattgtcaaaaccatgtatggggggagcagattttgcagccgaggggaaaattaccataaaacctagtctccgtaggtggtaagggatcaaggagcataaagtagaatgcctatggctaaacatgtccatgcttttcttaccttttcctttatttccaaagctactgctgttggcagtagaatagacatcacaggtgaatattcagtttaattatgggtttacatgtggctaccttatggctcgctgtaaggcaagaatgcctgaaatgtttagctggcattctttgtgtttctagataaagcaaaacatgtgctatgcatgctggacacgccccgtgccgtcttctgtaataaaagcagcaaccatatggtactgccggaaccttccagtatctcctataaacctcaagagccttgcagatctaaaactgcatagagagcacagatgctctggctggggtggcacaggtacacaggtggaagacaaaggtcaggccttatcgtgctagagcttacatcaggctaattcctctaccattgccaaaagttgaacttgactcacaattgtagagtcagcttaaggaacaagacctttcactgggttggatgtcgactttttgcatgtgaaagccagccagtattgcttatgccaactctctgggctaagtcccttgagaattagtttaaaaatttttgtagagctatagctccactctaggaatgtgaattcagcaagtttaattaataataataataataatgtcttattccattcaggctgctatcacaaaataccttagactgggttatttataaataatgggaattgatgtatcacaattctggaagctgggaagtacaagatcgaggccccagcagattcagtgtctggtgaaggctccgtctctgcttcatagatggcacttctcactgtgtcctcacatggcagaaggagggcaggctgtgtcctcacatggtgcaaggagcgaacttgctccctgtcatctcttttataaggctctgcgtttggttgaaggttatcccgaaaggattacttcccaaaggccctacctcttaatactatcacaccgggaatccaatctgaagatatgaattcagaccacagcaaatagtagcagcagctcacagctattcagtgcttcctccacaggaccgctttctaagtactttatgtactaacttttattcaaatctgtgaagaagttgactttattatccttacgttatagatgaagaaacggagatacaaggaaatgaagtgactcacccagagtcacacagatggtaaattggatggctaaatatttaaatggcacatgcggagagaagatattttgatgacagtttccataagaattggaatctatttttaaagtacagttatgtgtgtgaagggaatccaatgttaagtatggaaagtcaggctcaaggaaataactaattagtaattacatctttaacatttttaatttaaagtaatttaagattttcagaaaagttgcacacacagtacagagttctcgtacacccttcacccagcaacccccgatgttaatgcccttgtataactatagtacctgataaatttatgaaaaataagtgcttacagccaggtgcagtgtctcacacctgtaatcccagcactttgggaggccgaggcgggtggatcgcttgaggtcaggagcttgagaccagcctggccaacatggtaaaaccccatctctactaaaaatacaaaaaattagccaagtatggtggcatgcgcatgtagtcccaggtactcaggaggaggctgaggcaggataatcggttgaacccaggaggtggaggttgcaatgagcccgagattgtgccactgcgttccagcctgggcgacagagcgagagtccatctcaaaaaaaaaaaaaaagaaagaaagaaaaaataggtacccgcattagttactaggaatttttttaaagagccaaatagaagacatcagactcatcttatttcagtataaaaggaccacaagtggtactaagcagagcccccttggggcagtgcttgccaatgatgggtggcacccccatgcccattatctgcctgcaccttctcccaaccaaatagttcaggcatgggtttgtcttgagaaatgttttcataccaatagctaccatttattgagtgcttgctctatatttattgttcataggactggacctttatgctcagcattttatattcattgcttcattgactccccaaccaatcccatgaagtaaatactattattatcctccttcttgaaatgagcaaaggagctgagagaaaggaaggaaatggctccaagttacaaggtggaaagtgatgtagttggggccgcagcccgggcctggcttccacactcttgctttcagtgcataggctatgaatgttccaagtctctcttattaattagagtctcctttggaacaaacaattaacccataaatatttgctgaacccacaatcagcaccccacaaagttttttgaggtcacggaaggtccaaacatgggacttaaaaccaggggagaaaagagtaacacaagaagagaacaaagaacaacccatatccaagtaaaattaaataccaagtacatggtgatgaaatagcacacccttgggaggtactgagggtggggaaggggacagagagggaaggaccctgtggagaagcagccgactgaatactgtaggtatttgagagacagagagggaagagagctccgattgagagagtcagagggctgtgggaattagcctggtggtggctttcatgagaacacaaatataaaccataagccatcacatgcagagtttatggtccagatgcgagtgatttctcagaaaatgcacttaaacctgaaccctgagcagctgtgttaattgctaggttagttcaaactgtgtcttacctatgtagaatcactcaggttgaagataattcccaaagtaacgtagaaactcccgacaggagctctgcttcaggatggaaacctccgtttgcagtcagagatgagttttctttctagcttggtggggtatttatgggaaagccccgagctttggtggtgtatttttattttttgcctttgggcggtggtgctgatattatcagaatggtgtcggggtttttttttcttcttctgataggagattgtaataggttttctacactctagtgtgttttgtaaattcggtttataggagtagtaaaaaaaaaatccctcatgggaaccaattttcaatttaatcttgtaagtaaatggaaaaaatatcgggtgctttagagctgtttcaggagcacgtctctcccacagatagattattctgaagaagagtctaattttctcaacaacttgagtttgttaatttggtgtggagattgaagttttaaactgaactctggtcggggaggggaagacttcctcccagctcttacggcccagagactcctcctgcctacctagggccctgcgcgatttgatgtctgtcacccctgcagatatggagactcaccctcatcttattgtaattaaaacaataatattccctctgtgtgttcttccaccttaccatggtgtatttgttacagaatgaaggaaatgagcctcagctttgtatgataatcgttcattttttttgcttcacccattgatcatacattattgagcgtgtgtcctgctctcttcctggcaccagggatgctaagatgattaagacctagaccgtgtcacagactgtgtggtctttgggggagaattcaggcatgaaaaagaattggcgggtgctgtacctgcagtgggagtttgggagaaggggagcctcagtggccctggggaggcagcaggtgacagcttcacatcggaagtgcagtggagccgggaggacagggaaggaagaagagggcattccaggcaaagatgcagagtgtgttcaggaagctcagcaccatccaggatgtcaggaagttcaagtgagagttggagagagctggagggaagtttgtttctttccattttcaaagtatgagagctgcaatcatcagtttaccagttgcacaatccttaggagccatgcgcacaggctctgagttaaatatttctttttaaaacaggaagattttaagttccaggtagctacgttttcaacaagaacagagcatcagtctcctagcctgaactctacacatcaccctgagattcacagtgagcagagaccttctctatcattgctgggtaaggagacgcagcaggtagcccaacctttgcctaaaagctttgcacaggtaccttttgcagtgacaggcaggctgtggaatataataacttgttggaggctgccagcaaggagatgcaccaagctccttatttaaaggaaaaggcattagttggaagtcatttctgttcaataaatcttggttatgggatttggatccagatcaggaacgtagatggtgatgcagcagatgtatctgctcctttggtttgggatggagagggagagggtgctggcaagaagctgcttatcctcaggggcacccagagtgtccactgttggtgatcctgcatttgaccacctggttcagcgttctcagcagatccctccaactgcaaaggtatttttgttgttgttgttgtttgtaattaataaggaatctggatgtcatacttgatgaacagcaacctcccacctaatggttttaaccttgattattttattttttatttatttgtttatttatttttttgagacacagtctcactctgtcacccagcctggagtgcaatggtgcaatcttggctcattgcaacctccgcctcctggattcaagcgattctcctgcctcagcctctcgagtagttgggattataggtgtgtgccaccatgcccggctaatttttgtttttttggtagagacaaggttccaccatgttagctaggctgatctcgaactcctgacttgaggtgatccacctgccttgacctcccaaagtgttgggattacaggcgtgagccaccgtgcctggccaaccattcttgattaaaagagaatgaggagacatgattaccaaatgcaatctgtaacacttggttggatcctggatccaagaaaaaaacagctgtaaagaacattttggggacagtggggacagttgaatctggactgtattttagagaatgtttttgtaccagtgtgacatttctgggtggtaatggtcatgtgattttggaggggaatgctgaaatattttaggggtcattttttcctaatgtctacaacctacttccaaatggttcaacaaaagcaaaaaaacagacagaaatctgaaaataggaccaggcgggggttggggccaagaagagagcgtgtgtgcaggcaagagcacctgtggcggaataatagtgactctagaaagtgatataggtgttcactgtactgttctttcaacttcactcccaaaaacttgggcaatgatatctatgtctgaagctttgtttcagttgatcgtatttaaatgtactctgtagaggtcattcttggctagaaggaagcccctgctgaagcagccatcagagcgcctcagcagttaagcttccctgcctccaccctcttactctatgaccctcccctgcctctgtccatggccaccaacgcctttccttttgtggatggcagaccaaaggagacaattattctgcctcaacccaacgctgtgtttccttgtggttctgcactgaggctgggcccagaagcctggttcatgaagagcactcacctggcccctggcccctggcccccgttaaacaggtgagtcactgaccatttccttagagccacctgggactggctgcatgggacttgccatgacacagccggccagactgccacaggcaggttctgggaactgtacacttacatggatgggcaggggctgcctgggattgggagccactagtggtctatgtccccaagagcttgtatatgacccccattttccaaatagctcaggcagaaaagaaaatgtgagttaaacagctaaaggagtcatatgtaggtatgtgtacatatgtgtaagaagtaggctggacatggtgactcattcctgtagtcccagctactcaggaagctgaggcaggaggatctcttgagcccaggagtttgagacaagtctgggcaacagggcaagacctcgtctacacaaaaagaaaaaataaccagatgtggtggtgtgcacttgtagtcccagctactcaggaggctgaggcagaaggatcgcttgaacccaggagttcgaggtaacagggatctatgatggcgccactgcatgccagcctaggtgacagagcaaaaccccatctccaaaaaaatagtagttgtgggcacagtattggcaaagctgttgcttattgtataaataaacatcaaggagttggggaatggctgagtgggccgtttgcattctgcatctcccctccccttggataccactctcctcgatctgggggttccatgcctactttaaagacaccagcttctatttcctgcaagtttccagctcttaaaaaaaaaaaaaaaaaacaaaaccaacaagctttatgatgctcacatatgagaaactacttcctttagtttgtctttaaatactggtagagaaaagtccataataagaggggtaactgctcttcatggcaaagcacactttatctccatggctttgtagaagtttcatgaatccactaacatcagctaattctgaaagtgataggcattgttgcattaattttccctggggagaggcacagcaagactgggtcctctcttttgtagatggagaagtaagaatgagtggggcgttcagtgttcttgcagagaggattggtgggtccgtttagctaggaagtggtcgcaccatctagccaggggacccttattatccaatgatctctatgtgcctggcatcttgcaaatggaaatgctaacaagatccagccagtcacagcagtagcagctgcctagaaaggggacatgaagggcaaaccagagaagctccgggtgtttcttgaatgcttagatcctgtgagaagagaaaccgacactgattgaacacttttcgtgtaccaggccccaactggatgctttcctatgtatttcatcccaaccaccttttgggaaaaatgctatcatcatcaccagcagcagcagcagcatcattacccttttgtaagtgaggaaactgaggcttgtagagctcccgcagcctgcccagctgcctctagcacacacgcatgcccttcccactattgtaagcagctgaccgttggctctggctgagggaagatcctgtgattactcacagctgtttcccttgagtacagacacagcctacactgttgcttcaagtgcttgcaatttcacatttctatcctgcaattaattgtggaggctactctgggatggctccgcagctcctgtgattactgttctgttggcaccactgggggtgagggtctgtcctcacttccgcagaccctgcattttccagggtttccataatggctggaaataaaaatggcagcagggaatctgggtgaagtcttctgtgctggaaaatgaagaattaaaatgggcagaaggatggaaacaagccgctacaggacgtgttttgacagcatgtgagttgcgtgggcatgtgactggaccagccctttcttggcatccgtctggctttttcttagtggccccagttcttccccattggagactcatcctgctctcacgttctcacagtcttcaaagaaaccaaatctagcagtcacctgccttgagttcactggtgcttaacatccaggcacatccttggcacaagaaaacaggaaagtgcgtcttagctaaaacatacagcggtgtgcttgtaccagaagaaagcctgcacattatcccattcaaatgcgtatgcttttgggtcatgactggcatgtgttcagtggatttatctactctatcttcttccttgattgggcattcctaaacatcagtgtcttatgtccacatgaccccttctgtaggcagtactttgcccatctccccatatttaccccttatgtcccctacacgtttgcactcagatttccaagccatgagcagcttccccactgtggcaggcaacagcccaccagtgtttcttccctcctcacttttgcttgtgccattttccctgctccccagagaacgtctttttaacattcagctgcagttacctttaggaagcctctcctcacattttatgccatgcctgaaaccaaccactttctctccatgccctttataacatgtattatgagatttcacctgtgtgtttatttacatgttgatctccttccactatgtcataagtcctttgaggtcagagatagtgtcttatctcctgtacccagcccagtgcctcaaatttgtaccaaatgtgtgtctgttgagccgatgatgatgatgatggaagtacacaatacagcatagaaactgactcaggcttttactgcactcctcaccccaaatccaggtgactctccccattttagccctacatctggatcaagttaaaatgatcctgttttaacccaattcataaagccacatggctctgggatcctttagagaaacatctatcagctaagaaaaaggttgcatcttctcagagacacatgattatttacattccgactgtggtacctcgtcctgactgatctgtggctcatcttaatgtcagatatgtacagacttgcagcatgccatcccacagattgttattcatgcttggttctctgtgcggggactccaacagagcttttcactctgggtgcttagtcactagatgtgcgtgggaggcagcaagattggaacaaggggcaaagagttgccagtgtcatttccttcatgcagcatttgtctttgttgtaaagcaccctggtatccatgctcatggtgacatagtttctctttctcctgcttaagataccccaagtccccagattctttatagggtcatcagtcatctgtcgtctttgacttcagtgactgctgccaggaggaagcactcttaaagataggctttgaatgcttacatccctggaagaggagaagcaaattatttctggggcctctttcaagattaccccattagcatacagagacattgatattgactgagcaggtcattcttgtgcaggattttaattgcttctaattataggattatcatttaagcacaagattaattgctgtgaaattattgcaaggaactttatcttctggaaagtaaatgtgttagccaagtgagaaatctcttagaagcttgcaaatgatgtcttttcaatcactttccattgaaactttcttctaatgcttggggaatgagagagagatcttgggggatcaggagggaagacgaaataaataacagataaatgctccttttgtttcccggttctccatcaaaagggtggaaaacttgaagtgtttgggaatggttatgttcaccaatggaaatgtcctaaaataaatgcagaaatttttttcctctcttgatccatgtcatcttcaacggtgggtgggtaggaatggctcagtaggaagctagaataggcaggtgctgtcctatggtccttttcaacaccaagctgctctgatatcttagcaaaaaatatgtatatatatattttcagatgtgttgtaaaggaatctcccattaacatgtatacacctgctctgattattggcatcaaaatggtacagagaaacatcagactatgtgcatcttagcttgtaggcgtttccaattggaaagattcagatttcctgagaaaatatgagataagttagctcctgagcttgttctaaaatatccccatttgaatagggggccatggccacccactggaagctctgcacagagcatccccatgggggactttttatactgagaatggtagctgcctttacatgcattttcctttttaattaatgcaaggtttgtggttaattaaagatagtcagggtcccttttcaaaccaaagcaggcactttttcctagaataaagaagagagaatagaagcaaggcaaacttcctataaaagtttttgcagtgggggtggtgaatttggggaatgtggcctgaaggaagtgttgtttcatcaacttcgactcacttgaggtagggaatgtaatcaaaagagacaccttcctcactgaacacccagcagggacatggctctttttctgggaaatgccgcactgacctccctttctctttgttaagtcactctgctgggagtgggggtacagtgcaggagagacacatttctctgggatatattgctgctgtcatcttatggcccgcacaggtggaagaactctcgtggaagaactctcacaggtgaacatctgcccaaaagagcaagtgtatgtgcagtgaatgttagaaatagcaccagagccctccttactctttactaatacccaacctctctgaaagaccctgaagtctgtttcaatccctcccaccccaatatggcagggactctgttatccttaaaacttctggcttctgaaggatgctagtatatatttgaaaaacaaaaaaatcccagcatactttacatgaccaacactccataaagaaagaatacagcaggcttgtgtttataaaataatagaagtgacttgcatttagaggatactatggtgcattagtctattctcattctgctatgaagaaatacccgagactggtaatttctagaggaaagaggtttaattgactcacagttctgcagggctggggaggcctcaggaaacttacgatcatggcagaagaagaagcaaacacatccttcttcacgtggcggcaggaaggagaagaagaatgagagcccagtaaaggggaaagccccttataaaaccatcagatctcagccgggcacagtggctcatgcctgtaatcccagcactttgggaggtcaaggtgggcagatcacctgaggtcaagagttcaagaccagcctggccaacatggtgaaaccccctctctactaaaaatacaagaaattagctgggcatggtggcagacacctgtaatcccagctacttgggaggctgaggcagaggcaggagaattgcttgaacccaggaggcagaggttgcagtgagctgagatggcgccattgcactccagcctggacaacaagagcaaaactctgtcttcaaaaacaacaacaacaacaacaacaacaacaacaacagatctcattatcttcacctcgtccttcctacaacctgtggggattatgagaactacaattcaaggtgagatttgggtggggacacagccaaaccatatcatatggcgttgactttgaagtcaggtagactggatttgaatcccaactatagcactaattaatgttgaatacgtattaggggttgttactctattaatggagttttactccagtcacgttaagtcatgtagctcaatggactgaagcatgtcactttattgacaaattaactctttcagtcctgactctttcatggtgtagctataaccacagtgggactccagcagccccaaccaagaaaatctaaccccagacctcatttgttttttcttcactatgcccaccaagcaagacacaggaacacactgtgaaatcactttcaaaattggaaggcctctgtatgagtagaacagttgcatattaagctgaggatattaaccttaaagattttaactggctgtgaaccttgacctcatggcttaacctctctttgtttccctctcctctgcaaattcagattaaggcacttgaactacatgaaccctgacgttcccttcagctctggcattttgttgagagctgtttcagagagagctaatcggtggtgccaataagtgtgccccttcgtgaggaactgatggtagattggagactctagggactctgcaaatggatgaggcctgagaggctgctggtccggtgattttcaaacaagttggaacatcacatcttgtttgagatgatattcaaatgatatttcaccagagttactctgattgaagggaagaaaatagggtactcaccttcttcctcctcctccaccagccatgaggagactctgtggagcagagtttgaaagtcaaggatgtaggctgggtgtagggcctcacacctgtgtcccagtactttgagaggcggaagcagaagatcccttgaggccagaagttcaagaccatcctgggcaacagaacaagaccttgtctctataaagagtaaaaataaatataatttaaaaattaaaaataaaaattagccgggcatggtggcacacatgctgcactttggtcccaactactcaggaggctgatgtgggaggattacctgagcccaggagtttgaggctgcagtgagccaagattgcactccagcctgggtagcagagtgagactccgtcacaaaaaaaagaagtcactaatgtgattgttatcacactgtgctggggtccgtgcaccccatgcagcaaagccaaatgctgatgttgggttaacagcaggagaaactgaggcgtttattgccaagcaaggagaattgagcagctcgtgctgatgacttgaactggcagatagcttacagctatccattatttaaaggcgggaaggtggaggttacagtcgaagtcattcagtacctgggggccacatgttggtttgacccaaacaggtaggacatcccaaagctggggaggcggtgtgccacagtcatggctggattcaaagatcttctgatttgtgattagttaaggaggcgaagctttgtctaagaattagggatcaacaaaaaaaaaaacaatgttagctctggcttttgggtacaaaagcatcgaagggagatggaagaatgtagaacaaagaacagcagtcagagtgctgtcttctgctccccccatccaagggctgtgtgccagtgggtccgtttggtgggggtccagttttctgaaacaactcaagggcatgtgtttagatgttatctttaatttctacagaaagcaaaacatctcctaacttccttgctgttgttttaacttactgttaccttcttccttgtcaagttgctcatttaattctcaaggctacctaggtgcctggaattttccttgaaggaactcaagattttcctttatttccatgttagggggtgctcctgcccggggaccctctgaaaattctgtcccatggtccatccccttcattttcatgcataaaaaccacggctcagggaatatggctactatgtagggtctttggggttataaaggataaaaccggccgggcgcgatggctcacgcctgtaatcccagcactttgggaagccgaggcgggcggatcacgaggtcaggagatcaagaccatcctggctaacacggtgaaaacctgtctctactaaaaaatatatatatataataacaatacaaaaaattagccgggtgtggtggcgggcgcctgtagtcccagctactcgggaggctgaggcagaagaatggcatgaacccgggaggcagaacttgcagtgagccgagatcgcaccactgcactccagcctgggcaacagagcaagacgctgtcttaaaaataaataaattaattaattaattaaaggataaaaccaacccactcaggtagaagggggaattagcaaaagaaatctagagtatcgtgaaacgcaagggtgggaatgccttggagccataagaatactgagaacccaagattctctttctgtatctcacctcttctttctccatactgccttcatttgtttcttttccacaacacgttagactttctttgcattgcagaaaacatggccctagacgattctacagcttcgcctcttgcagctgcatgtcttctactgtgtcagtcacaaatccaaaaattctgggaaagggattcatcgactcagtgtgggtcacatgccaccctggaccaatggactgtgactggagggcagatatggggtggggtgggaggtgggagacattttcaggaacaaggaatagtgagaagcagacaaaactgtaggtaatgcaacactgccatgaaacgtgagccagggttgtgcaggaagtgtgttcaggaggaggatgcagccaggctcctgccttctacttcgatgctcctttccttcaaccaccttgcacatccgtgaaattactcaagagggacagtggctgagcttatgtccaaaagttggatatgactcatcagttccttttgaacacgtcaacctgctcctggcctggctggtctccaaaaacagccaagggtaaagaaaaaaacttgattgagtgacatttgtccaattcagccacccagtgcattaatcaccctttttatttagaagctgtaaaacagcacaacaggttccaggcgtaaatggtgttgatgtggaagagattgagtgatggtggtacccgcaggaagcaagtcctttgaatgggctcacggggagattgtggaacaagtggctcaggaaggtggagctgtttgatcagggcctaggaactagacaaggccctccagaatgcattttgagccattggccttaaacaaccttcccctgcggcagctttttctgcaggccacgttgctgccttggcagaccctcaccccttacccctggagcttttctttcacgaggaattcctactgcgagaataaacaaaggtagttggcagcatgctaacaatgcctccaggttcttagcctctgtcctgagaagagccagccaggcaacctggctttcattcagcaagggaagagaaaagcaaggtaccttttatccctgaatcatcgccacaaggccctctcaggtcaggaaactgatgtgtctcctgcttggtttgtaaaccatgtggatgatacccagaatatcaggtcctctctctctcttccgtccaaacgaaagcacttagatgtcacatgcccaccttgtaagtcctcatgggatttgggatcctcatcctgtgcacagaccttgactcatgggctctacaacattggctgtcttcctgtttaatttccctttctactgacagttttgccaattcagtgatggctttagcgccatggctcagcggcacccaagcagcttgagacatccgtggtttgggggtcatcttagttatttcatggaatgaaaagttttacatccaagatactcggcccccagtcatttcttttctgtatcaatttagtctctctttagttttggtgcatgtggttgacttgtggtagtctaaggtgttgacggactggcccagagagagatctcaaagctagtgagaatgtgtccaggttcttgtttgattttgttttggtttgattttgattgtggtcgagataagaggcttttccaggtgaaaatctcgtaggcctggcatcatacctgtaattaatgtttatcttctgctttatactctcagattaaagacagcaatggtataacagcaaggctggaaagaataaagtttactcctgttttatctctctctccaaacaccgtagtgttccagagacagatactgatagtctcttgtgctcatgaactcctagtagctcctgataagtacatttctcagagaatcagctctgagcccatttgtggggaacaagtgtatgggaaagtcgtcgattctgcaggtgttgggaacagttctgtaatgggatagcagatccctcttctgctggcggatggaggaaggatacccttgccggtggacagttgcctcctaatcaggaattatgcctcatgctcagccagggccttccaggcaaggaagccgagcaaagcccactggaagacagggctccctcgggcacaaacaagaacagcttcctgctcctctccagcctcaaaggttcatgcgccttgtccctcagataaaggtgctagaaagaaggttggtgtcactggacgtcgtctcttagggtgattcagctacttcaggcgaggggttgggaggaaccaataaatatttttgtctttgtttgccacactgatgtgaatgcttataattttattagcagctgcctgggagccaggcctgacttaatttaatttaatctcctgggttatttcagttcggtttagtctattttaagcacagatgaagaggaaataatcagaccgaggggaaagatgagggaggggctggaggggccatccgctgccctcgctagttcctcaggcttaacttgtcttgatataaagggaatgacttcatggaggcaggttagccagacgaagttctagctctcactgtgttttgtctctggtatcatcaccttgttctctaagaaaagaagcatgatatcagctttgttgggggagggaggatgggggatattaattatgccactagaaatacaaatggagcaattttcttgtgccaggcaggactgaatagtgacaccttccccggccctccctttctccttttagcaaactcactgatcactgtgttgtggtagctctttctctttggagtgttttttgttgttgttgtttggtttgtttgattttggggtttttttttttttgagacagggtctcactcagtcacccaggctggagttcagtggcgtgatcttgactcactgcaacctctgcctcccaggttcaagtgattctcgtggctcagcctcctgagtagctggaactacaggcacatgccaccacgccctgctaatttttgtatttttagtagagatagggtttcgccatgttggccgggcaggtctcgaactcctggcctcaagtgatccacccgcctcgggctcccaaagtgccgggtttctaggtgtgagccaccgcgcccaaccgtctttggagtgttttgatgccctgggattggtggtttgggaggcaggatggcagagcctccgctttgagcagtttcttctgagtgaatatgtggttcagaggcccactcagcgaagcccaaggcccaaagaccaccaagtcctgtggcctgggctgccctgcctgccctgagcccaggagctgcgtcccaaggccaccccatcatttcctgcccccagggcctgtgaggctgtgcatttggtttagtaccaggaatcatcaagaacaagagaaattcatgggcccagtcagagaacccaaaggtaatgagaatgtccagagggtttttttgttttaaacagtgattgagatgataagaggtattgccaggtgaaaatctcttagccttgacatcatcaaagaagagagattcgtcatctcatgatgaagagagattcatctcaatttcttgtttctttggggtttttgttttgctttggttttttttttttttttttttttttttggcaatgtcttgctgtttcactcaggctggagggcagtgttgcgatcatagctcaccgcagccatgatgagctgccgggctcaagtgattcttctgcctcagcccctgtagctgggactaccacacccagataattttttaaatgtttgtacagatagggtctgaccacattaccaggctggtctcacactcctggcctcaagcaatcttcccaccccagtctaccaaagtgatgggattacaggtgtgagccactgtgcccggctcattgcagttttatatgccaaccctgaaagcagaaaattgtatccccactgaagtgctggttccatgaacccaggatttttatgggtcttattcattgcagaatccccgaactcatggtgcctgggacccagcatgttctcagtgtgtgtccgaataacactggagggttttttctggatgatactgataattacagaagttaagagttattaagtgcttattttgtgccaagcactatgccaagggttttacttgtataatcttttttaatacttaaacggttcctattgcatgaaactcttaccttcatttaaatggaggcatagaggatttcaggaacttgccaggtgacaaggtggagctagaacttgaatctaggcagaacatttttatctgtgtcctgagagtttccatgagaacatgaccaaaaggttttctggtatacgctgagtcacctgcatgagtgttcattcagaaccatcctcccaacaccctgcacagtggagatgccctgagaagggagcatcgctgggcttggggctgagtgtaggagtggcaagagggggtccaagtacctcccatggctcattaaagtcacctgagtagacctgctaagcactcactcctccatgccggatttctcaaagtgtgctgctggtctacctggagtggggtagagtacttccccaccccaggcttcctgaatcagattctctaagaacaagcgcagagcctgcaagtaaattctattgttagtgagttctccaaggtggttcttaggcacctaacatttgagacctgcagctatgggtatttttgctcctagccttgcggtatgttagatttacttaaaaacatacaagtgtctatatgtttgggatggtgttggagggaatttattaaaactagagttcttctttatccagaaaagcacacacattaggaaaggcaatagcatctgaagacagaggagtggcgtgtagctcattttggcctttcctgttgaaggcccccaggttcactcttgggatgaccaggcccctagagaccaattccaatgtagtcctgactgggcagtccatcaggatgccagtttatgaatttacagagaacaataaagttgaccatgtgacttgatgagagcaatcagtgtagagaagataccaggcaaggcataatgaacccattttattgatttgtcaaattaagcaccatcacatagactacatagagcagaaatccgctttgggagtgccttctcccctacagacaaacctgaggggactcagaatgctgcctagcaaacatagaattataacaaggggatgtgataaatgttggatggcagcagactaaggtttaacattcatctcaagttagaggcggctgctgtgctgctggggccagaagcacttgaagtcaaatgcttagatgccgctccttggacctgtgtcataggctctgctgacatttgcctggagcctctgctttctcgctgctcatttgaacatattcatactggacacaagctggtcctacaagcctagtacctctcagaaccctctctccttcaggggactttgagaagctctgctctgatccaatattgatgaatccagtagtttgttgatttccaaagaaagatcttgctttcctcatttcctactacccaaggaagggagaatcacctcattatggctccaaatttcaacagatgttatataaagggctatataagtattcctgtatcttcattctttgcaaaaatgccttccccaaaatctgactctttgtctgtcagataaatgatatgtagaattttgtatcttaccttctaggagaaagagtagtcgtaactctccatgcctctccagggaaccctttgaatcccccccccacacacaaatttagagattatttccaggacaaaggactatatgaaggacccttaactatctagtacccagactagtaacgtagactttggtgataccatgaaaacgaaggcataatcatgtgctatgaaaatggattaggaagcagcttctgttcacagtagaaagaatcttagagatttccctgtccagccaactcctttgttttccagactgaatataaaaactcactaaagattgcccaagaaagtgagcagcaggacagagcaagccgaaggtccctgcccagtcccttcccccacctctgccaccttttaaatcccatctggaatgtctgcgtgtttagttcagttggaggttagggatctaggaggtaaaatggccaccaggatgatgtcaaatcgagttaaacagatacagccttggcctttaaagaacagaccacactggaggcatatgtattcatccgttcttacactgctaataaagacatacctgagactgggtaatttatcaaggaaaaaggtttaattggctcagagttcagcatgtctagggatgcctcaggaaacttacaatcatggtggaatcttcacatggcggcagcaaggagaagtgcagagtaaagcagggaaaagccccttataaagccatcagatcttgtgagaactcactcactatcacaagaacagcatggaggtaactgcccccatgactcagttacctcccaccaggtccctcccacaacacatggggattaggggaactacaagatgagatttgggtgcagacacagggccaaaccacatcaaggaaccacattcaaaagccacccacacagggacaagttaacaacatgaaagcaaaggtaagagtgtctgccatgagaactgatggtaggcagcttagatgtgaagtgagtggccaagagtaatttattcctcttccaattaaccagactttctagaaacagtggaattccaagagctacttaagaaatcgagatatccttgcatttctggattgaattgcggtaaccagttggtaacctctgaaatgcaatctctcttatgtccctctgaaatgttaagaagattcaggaagtgacagaaacccacgatcaagactggcaaaccacttactgccaccttggagaaatttctgttgcccgttagcccagtggtcaagtgttaagaaacaattatcagtggtctggccatactggatgcatgaaaaaaccaaagtcctgcacacctgaaagaaagcaagaagattttttgggcctccccttttgctcagataaacagggtcttcgaccagccaaaaaacctgggaggcactcctttgctatggagtttctctcatttcagaggaccaaaatagtgtcttctctcatctttccatacagtctacaaatagactgtaacttccaaaggaaaaagaaaagggctgttgttggtgagttatgtcctgagggttagcagctctgcaagcgaagtatagtggacacaggtgtggaggtgagaagaacttcagggtcaggggattctaactttaaacggacttcacagattcaagatgtgtaattaccaagcactgtgaattggaattaccaagcactgtgaattggatatgatcctacctggctccagcaaaaacacactcgtcattggactaagagccatgaacatcaacttgagtgccctggaagagggaagcaagttctctagtgtcccagtagacagtggatagagccaatgtggcatacaaacagtatctttgggcaaataacacatctagatgtacttgtctttgaggacaagtaaagaaagaaaacaaacccaaaatatggggcccatttttaaaacatgggagataaagggatagtatcatggagaacatatttgaatatagattattggaagaaaagaaattacagaagagtatttgagaaaactccatacacattataatagggtgcaggaggctgggcacagtggcttacacctgtaatcccagcactctgggaggccaaggcaaaaggatcacttgaggccagaagtttgagaccagcctgggcaacatagcaagttctgcctctacaaaaaaatttaaaaattagccaggcatggtggcacacacctgtagtcccagctactcaggagattgaggtgggaggattgtggagcccatgagttcaaggctgcagtgagctatgatctcatcactgcactccagcctgagtgacatagtgagaccctctctttaaaaaaaaaaaaatgcacaatctctgtaaaacaggaacataatgccatttgaacaaacaggttgagaggaaaagcaagcagaatgagattttttaaaatgatagtgggctatataaagagacagaaaagatgaaaggaagtggacaagtaaatgccagtttccagtaaggaaatttatagtacataattaaaatctttgtggtgcaacaaacagcagaattggcattgcagaaaatcaaatcagcgctgtgcaagaatcctgggaagctcttctagaatgcaggcaaaaggacaaaaccatggtgatgaaagagagaataatgaaaaatggaagactgggaacaggatataaattgagaataatagctttgtcccaaagataaaagaagaaaaaattgaaaaagaagcactaattcaatatgataggaccaaatttatggagcattcaaatgaaaaggaatgcactctgttcctacaaaattaaccaaaagaagtctgcatttagaagcattctgggctgggtgcggtggctcacacctgtaattgcagcactttgggaggccgaagttgggcagatcacttgaactcaggagttcaagaccagcctgggcaacatggtgaaaccccgtctctactaaaaatacaaaaaattagctgggcatggtgatgggcgcctgtagtcccagctactctggaggctgaggcacaagaatcgcttgaacccaggaggcggaggttgcagtgagctgagattgcgccactgcaccccagcctgggtgacagagcgagactctgtctcagaaaagaaacattctggaaaacttttaattacaaagaaagaaaacaaatgtcttttcttcagaatatataggtgacctacaggagaacaaaaaccaggttgtcactagacctctaatcgtatgcactactaaattttaagagataagaaaacatcacttacagagtttggaagaacaaagtgaattggccccaaatttctcacccagccaagttgccagtcgtggcatattctcagagatgcaagagctcagaatatacatcacccacactttcttgaaaattatttaaaggcgagctaaagaggacggcaagatgaagtaaaattaaaagttcagggatgggaagtcatataaggataagcagtaagcactaaaatcagttgaacctgttaatgtggaaaacagctatcaaaactgtaactcatataaaaattatgacaagcattagagatcccatactccagataattttacagtaacaaaaagaggaagtaggatgggagctcacagggagtaagaacagagcatgcacaatgcttcatacccttggggagaggagtcagaagatgctatctcattctttcctttggtgatcggagaaatgtaggataaaaaatgttttggggtgaatcttgagatagtcagcagtagaatttaaacaacattttaaaaattttggccgggcattgtggctcacacttgcaattccatcactttgggaagctgaggtgggaggattgcttgaacccaggaattgaagatgggcctggacatggtgaaatcgccatctctacccaaaaaaaacacagaaatgaccggtgtgatggcgtgtgtctgtagtcccagctactcgggaggctgaggtaggaggattgcttgagcacaggaggtcaaggctgtagtgagccatgatcacactactacactccagcctgggtggcagagtgagactctatctcaaaaataaatttaaaaaaattatagaaaaaataaatgcaaagaaaacagagtatagtaaaagagtgaaggctgggtgcaatgcctcatgcctgtaatcccagcactttgggaggccgaggtgggcagatcacaaggtcaggagttcgagaccagtctggccaacctagcaaaaccccatctctactaaaaatacaaaaaattagcctggtgtggtggtgtgcgcctgtaatcccagctacttgggaggctgaggtaggagaatggcctgaacccgggaggcagaggttgcagtgagccgagattgcaccattgcacaccagcccaggagacagtgggagactcatctcaaaaaaaaaaaaaaaaaaaaaaaagactgaaaacaaagcaagtaactaggagacagagggacaacaacaagtgaagctccacacgacagaggcagccaagaagtgggggggtttaagaatgtactggaatggggctgcctgtgttttcagcccctccccttgctagctgggtgaccttgtcctaggtactgcttaatctctccaagcctcagctttcctcgtctataaaatgtggataccaagtagggttattgcggaggttagttaatatgtccaaggtgctgagtaccttatcaggtacgtacttgtgggtacgaatattgaggataaggtaacagattaaactgcccaccattttcagatgggatgttttgctaaagttcagcgatatcctatgaatgagacctacacgtaaagtaaaatgacccataaacactgagaaaaaggatgggcagtgatttatgagatgaaagaaagaaagcagtggaagtagaattgccccaagtcaggaaactctgtgtacctggatggagaaagccgagtcgggggcttgtaccactaacatgcattggaaatctagaacaatttaaagtctaagcttgttgcacaaattagcagaaagttgaagaagataaaatacatggccctgaaaacagagcgaacattaacaaacagaagccacacagaccaatgggaaagatagggcttattccactaataatgttgagaagttgtctaaacatttggaggaaaataaatgagatcttctttcacactgtacaccaaaataaatttcaaatggtcttaagagttaaatataagaaagaaacaaaataattaaaacttaggtgaatattaagctaatctcagaaagggcaaggtttttgtaagcctaaaagaaatggaaaaaataaaaggaaatgtttgacagatttaactacataataagttaagcttctctgtttctagaagaatggtgacatgtaacacagtttgcagcaactatgacaaaaggcttttatcatttatatctcaacaactcttctaacacagtaagaaaacttgttactaccttctagaaaacttgaataaggagttaagtcaggcagaaataaatacaaatgggcaaataaccatggaaaaaaaatttaacctcaaaaataagaaagtcaaaattacagtgttattctttacttttctcaccacttcttgatatggttttggtaggattgtggtaaacttttagaggagtaatttggcaatgtatgccaagaatcttgaataatttccatcctttaagctacttccaagaatgtattcttattcttctttgcatcagaaaatctgtggcgttcttaaacacacagggtatgatcagacttgcacagcataaatagaacaagaaaaaaagtatcagaaatttcaatgaatatttatgcatgaagatgatcagttgctatgttatttgtaaaggtgaaaaatgataaactttgtagatgcccccaaacagggaattgattaaataaattctgattagccataaaatgagatgttagacatttaaaatgttttcaaagcatactttgttataaaggcaggttctaaaactttattcctagtgtgatgtgaattctataaaaataaatatttcaatgtagatagatgtggaagatactggccataaacatgctaatgtgccaatgttggttctcccatgcagaagtatagttgttttagttttcttctttatatttttatgtctttaaatttcttgtatgatgggtgcacccgttactcctataataagaaaaaaattttcttaaatatcttcctacgttgtttatgcagaatcgtttcagtctctcataacctgggaaatatttctctcacaactaggtttcattttcttttgaaacatcagaattatagaactttaatgtaaaattttatgtcccactaattgtaaaagggaaagtaatgaaatatttatgatctttttccaaggactaaacattgttgtttctcatcttataccacagtcctccgaattctcttatgtaagttttgttccagtagaattttggttgatgagttgccaacctgtgttttctggtacgtgaatgggacagaaattcactcttatcaccaagcagccagcctcaccagcaaaatagaatattcactaaataggttccaaataagaaaatggttaatgtccctcagtccaggtttgtgtacagggccatatgaagctgtgaggcgatgtctgatcaggtgtatttttagtgtatctcattattcttgcctttgtctctggtaataaggaaacaaatatcacaaaatttaggggtcattatttctaaacatgaaagagatcacatcagaaattctgcaacattcataaacacagacggtgtcagcagacttgatacagcataaatagaacaaatgcagtgaactagacagcacccagacccagtttgtacacagaatctcagtctataattacccagtcaaaaattgttcatcgtggttgatgacacctgtgcattttatttcctgaaatctagagaagttccacgtgatcactatttaaccaagagcaaaagtccctttctgacccatttttcctgtaagtggagatacatcctgtgctcttttgtctttgtgggtacagagattctttcttcaaagcatttaacattttcaaaaaagtgtgccactccttttggcctggctttcttcgcccgtgaaaaggcctgggtggtttttccttgtccaagagtccctccaaatggacgctttatgtactgcaaccaagagctgagaagtttccaagctttcctgtctgtgttagcattccggtcattcagcaggaatccaatgagcgcagattttatcttgtctgtcctgtgttgccctgggggagtgatccctggggatgcgagggggtgtggcccttgccctcaaggtgctgtcagtctgtagacatggaacacctttgggctgggctaggctggcaggagagtggaagggcagaggaaatgggtcttgtgcaaggctaagggctgacagcactgagatggatggaggagtgtccccagcgatggggcagtgtggacccagaagcacagagcaaggtgggcacagagatacacgtgttcagcagttactcagttcacgcatggtgctgtgctgggcagtaggggttcaaaataactaaaagagactaaccttgttggtgtggagtggttcttttgggttatataaatactaaatgtgataggttgcatgcagttaaatatttagcatatagaaccaacccatcagaaccaatgccagctcctaagtcataccagcatctgctaggggaatgtgggccagaagacggagcgtcactgacatttagatagaggtgttcaagtaaatggtaggaaacagattagaggcctgttttccatgttgggagcctaaaagatacagtaaccaagtgccactcaagctgtggtagagaatatctcagttctaacttgttaatgggagaagaatatgattttgttgttgcttctggccaaatgattccagtgaatcagtctgatgagtggcagtgcctgggctgccacccacaaccaactctcacctgtcctgtcgactcttcattgttcatgcttgagaaatcagttacctccttatgccatggagggcctgactgcagtgcacgcccaccaatgggaagtcgtgcccacaccagtggcaagatatgccaccaccatcatggaccaaccacccaacgcctcctatccaaaggcagatcccagcaagcacttgctctctgttgccgggacttctcccagctccaaaactgccttagtctgatctattaatatatctttttaactgggtggctcataaacaacagaagtttacttctcacagttatggaggctggagactccaagttcagggcacaggaagactcagtggctagagagggcccatttgccgacagccccacatcctcacacggtggaagggcaaaccagctcccttgggcttctcttataagggcactgatcctctccatggaggctctgccctcctggcctaatcacctcccaaaggcccctcctcttaatgtcatcgccttgggggttaggatttcaaacacaaattgggggcaggaggcacaaacattcagaccacagcacagagctcttcccatccccagccgaagtaggaatgacccagaggaaggctgctgtccctttgcacacaggttctgaaagtgcgtggagagaggacgatccctcggtccctgcagaaccaggctcttgaagcatatagcagaggttctctacccagggcctaccctagaatgtcatcaaaactgcagtgttgtattaaaggggtgcatggcttagagagaatggagaatgcccagcccagaggcccagagtgttttaggatgtgcctgttacccaaagttaaaatctgtatgcgtcaggagtgacacttgggagctacacttcccaaccccctctcctgcggccaccggagcctgcctgggccccttctcctgaaacggccttctctgcccacataatagcccctagcgatgccagttctggttcctccgcggggtcccacgccagctgacccagcagtacctgtaacgtgtcccacccttgccagggtttgtgtgcctgcatggttttagaggttccaagtcagagcccctaaaccccttgccttattgctagacagcttgaccgcccccggaacatcacgtgggaagggcgctcggtaaatcctgttctggaggcaatctgtcactccaccagtttcccaatcaacatttgccgaggagttctggctcccggtgcagaactgacttgtggcgacgtgagggaactggcagcttcttagacccaagttctccctcgcagcatcgtcagaagaggcccaaagtagagacgcaaacaaaccctgagaacagcgtgttcttcccagtaacgtgaccgggaaaatgtgagccagaggaaacttgagagctccgtggtgcggctgagctggtggggtgagggttttttccctttttctatctggtccagcccatcggccacttgagatgctcctgaactgagtaaccaagctgttcggagggtactttctcagcaggacaagccctgagctctggaaaaacgcagctagaataacgaggaagcagaggggcctctcccacaccaggcttgccccgacaggtcagcttgcttgtggcccagcgctactgcgcacatgttcctttaagatccctatttccgaggcagccgtggcataattaaagaatggccctgtggatgtcctacggtgctcactgtttgcacttgcttctgggtggggctaaggtgtgggaccggccggggaagcctgaacaaggtggggttggccaattgcaacaggtcacagccagatcagataccctgaggaggaggctgtgagtcatgtttgtccagaagtgccaactgctgcaccagaaaagccgggagaaaagaagcaagcgtaaggtgcacatgagaggtgctggtttctgaaggttctgttaagacaggagaagatggatcatagttcctgtcaggagacacaccctctcccccgacccccagcccagaaccccttccttgctttatagcacaaggtgaaagttcagaggctcagctcaaagcagaaggaacctaagggaagtagagcgtccttttttgtgtcactttctcctcaaacaactcactgtgttggtggggtagtgtttgttctatgctgggggtcagcaaactacggcccaaggtccaaatctggcccacagcttatttttatttatttatttatttattgagactgagtctcgctctgtcgcccaggctggagcacaatggcacaatctcggctcactgaaacctctggctcctgggttgaagcaattctcctgcctcagacccctgagtagctgggactacaggcgcacgctgctacacccggctaattatttgtattttaatagagacgagttttcaccgtgttgcccaggctggtctcaagctcctgagctcaggcagtgcacccaccttggcctcccaaagtgctaagattacaggcgtgagccactgtgcctggcctattttttaaataaagttttattggaacacagctgcgttcgtttgttcacatatcgtccgtgtctgctttcgctatgcaatagacctgaatagtggcagtagagactttgtgacctgcaaagcctaaatgactggtgatctggctctttttagaaaaggtttgctatctcctattccacactaataggtgaacctgaatgcagaggtcaccttgtgaggaccacacagaggttaatgcccaggccccctgaggcaggactgagttgcactcctgactccatcccttactaaatgttcaaccttgagcaggtttgttaacatctgtctgccttggttttgtcatctggaaaacgggcatctgagtcattatttcacaggagtattgtgagtattaagtgagtgggtgtagtaaagcacgtggaaacctgtcagtaaaggcctctttgttaattcagatataactcacaggtcataatattcaccctttaaaaatgtacagtgtagtggttttcagtatattcacaagattgtgcaatatacaccaccactgtctaacccagaacattgtcatcacttcaagaagaaattcctcagtagtacttgtagtaggatgaataaccaccacccaaagacatcagatcttaatccctggaatctgtaaatgtgcccttaatttggaaaaagggtctttgcaatgtgataaagttaagcatcttgaggtggggaaattcttctggatgatctggatgggccctaaatgtgatcacatgtgtattcttagagaggcatagagagaaattacaggcacagagaagaaggtgatgtggccacaagccaagtcatgcctgccaccactggaaggtggaagaggcctggagtggattttcctctagagcctccagaaggaacatggccctgcagagcccctgattttggcctggtgatgtggatgttggactcttggcctccagaactgcaagagaatacatttctgttgtcttaactgggaagtttgcgtatactttgttccagcagccacaggaaactgaggatacctattgctaagattactattgatgtcatcctgctagcagaaggtaggccagagctagattaagtcctgtgatctgaactggggcagtgtgagctttagcatactccacttagtggtggagaagcctacttaagccaacaggcattcatctggcaggcaccccacaccttttccccacaccacttacttttttgtttcctcctgcatagggctaaacagtccttgttgactgaaaaaaaaaaaaaggacagtcccagccacccaacaggcttctcgtagtatgcacaccactgtcattgggaacatgactgtagggaaatgaacactgttttagatacatttatgctattttgtggagtgtcgtttttccttggtttcaatatttgttttgtggccttaaaaatctctacatcggtgcagatttacccagcccattttcacacccactgcaatcttcttttccctctatgctttccatgtgctgtttgtcctagaattggtaactgcagcagagagagagagaacccacaaagcaccatttcctctttggtggcatggttgctgggtactcactggctacgtggtcactgggtacatcatggtcttcattgattcagtccctggcctgttggttcttaggcagatgtcagcacattccagctgtagtgactggagcaccccagtgtactaagaggtttattggttttagaattgcatccctgaagctactacactcacacctttttttttttttttttttctttgagacagagtcttgctctgtcacccaggctggagtgcagtggcgcaatctgggctcactgcaagctctgccgcccgggttcacgccattctcctgcctcagcctcccgagtagctgtgactacaggcgtccgccaccacacccggctaatttttttgtatttttagtggagatggggtttcaccgtgttagccaggatggtctcaatctcctgacctcgtgatccacccgccttggcctcccagagtgctgggattacaggttgagccaccgtgcccggcctacactcacacctttaaatcaggtgcagcacctttaaaccccttcactaagttcaaggcaccaaagcacagacatagctgtgcaggctttgcctgccttcccaccactcctctaggcacacccagggctcaatacagcactgcaagatgtgtgttcacttttccctctgtgctctttggccacccatctttctagtggaagagtttcctttcctcctcgttctcctgagcaacgttttcctccatcccctcctagctgaggctgacttcaccacctcttctctgggactttgtcttgctcaagtcatttcaatacatcagcaagcgaaagtggagttttgtacagtcagaagcttgcccgagctcagctactcattagctttgtgtggtggacaggttatttcacctctctctgcctgaaggccctatctgcaaatgggcttgataatagcatctttttacatgaaattaatttatggatctaaagtcctttgagagaacattctggatatctaataattatcaaaataatgaattctctgggttcgaagtcattttttattcctcaaagacaaggctcatgggttgtggaagcgtccttcactccgtggcctggtgttgaatgacatgaagttcttttgaccacagacactaaatctcgcctgtttccagcacttacctgcccttccaccaacatttttgcattcacatttcttttgctgtgggtaacttcaaacaaagaagagtttgtttgtttgttttttctgcagtgtcagagaacatttttgctcatgcctggtgtggagtaggattcgagaattttgtttactctcgcttttgctgtcaggcaggggtggaggtgggaggtgtcacggggtcagcacagactgaacaatcctgacttttgcagtaattctgttttgagcctttgtccttgtttttggcttttaagtagaagccaggagcaggggtgctcttagagggggggagaaaaagtaataaaaacagagaattatttcctaaagcaaaacagatcatttggagggccatgttgtccttaaatatggagacacttgacttttatgcattactaaacagtgtctctgtatagacatgaaccctttgatgggcagagtcactgtgggtcagtgctgacaagtctggtcctcaggcaacagggatacagctgtgtcctcaacaaagcttttggtgtatgtgcccgtggatgaatccttcagaacctctgcatgaccttactttgacccattgcccagctagagcaccctcagagtgaaattaaaaatccacattgggggtgggggaggtgggaaaggggcacacgctgggtaggttcagcagtgttgccaccgatctagcttttatgcaaggcagtgagtcacaggtgtttatcattccaccccaccatttatgctacatatattctctggattaagaaaccacctggagggactgggtgcagtggctcaggcctgtaatccgagcactttgggaggccaaggtgggtggatcacttgaggtcgggggtttgagaccagcctggccaacgtggtgaaaccccgtctctactaaaaatactaaaattagccaggtgtgatggtgggtgcttgtagttccagctactcaggaggctgacgcaggagactcacttgaacccgggaggcggaagttgcagtgagccaagattgcgccactgcactccagcctgggtgacagagggagactccatctcaaaaaacagaaggaaagcatctggaccgttctctgaacggattgcattgatctgttggatcagtggatccaatggatcaaggattgcattgagttatttttttttaattgcaaattactttggaacacctagttgctgactgtttcactgtagcctaatggggtctgttaccctgaggaaacagccctgcttctggggtcagagagaactgaatgaaagtgggagtagtggtggtgacggcgaagatgataaagatagcaaatgcttctttaacactaccattagtaataatagcaagtatataagacttactttgtcctgggttctcttctaatgctttgcgtatatcaattcacttagttccacagcaaccctatgggttcggcactgttattttccctgttttacagatgaataaactgcgaagttgggtaatttatccaaagccatacagctaataagtggcagggcagagatttggccctagctgcccacgctcttggtccctaagtgatgctgcccctgagaagtcacccaccacctgcagcacccattcacgtgagatggcctgactttcccctgtgcaccatcagatgtgtatccctcactcgggtgcctgcaagcctttgtgagcgcaccttgcttctctcagggaaagcatagcggtcactcccgcctggcttcctgtctgggtccacatctccacttttcatcaagcaggctcttggcaaaatcactggcttcattgcctagcctgcactgtgccatctactgtggtgcacctgtggcttagattctccaatccggctagggcggcccagtcctgcgagctgaggagcagcccatctgcctgtatccccactccattcctgaacatttacttacaactctaaaactctcatgtcctgggttcccgagccacctgcatcggggatcactgggtaggtggttctccatcttcatcatcttatttgaatgggctttatccagaaatgacaggttacatgatcaggaaattatataaccttctaacccaggctggtttttctcagtgccgggcttgacagctgataatttcagagcagccatctgaagccaaaaaaatgagaatataattagtattctgtatttctattaaagttctggaattacagaacagactttctattctgaaatggccagtgccgtggcacagatgtatttcctcagcagatgtctcctcctcataaaggctgcagaactgctaatgagctgcaatagaaaagcattcttcccgcgttccctgccagggccttgggcccatttgggcagacctcggggagcagtcactgcttctgcagctgaaggagcaagggaagtgtgttgtttctatactgttgtgtttagagactacctgtcttttgaaagttgagttggcatgatagatcttttaaaaaaaaactcattttcaatagtgtgtgtatctaagtagtgtgattttgttgttgttgttgttgttgtttccttatcttaattctgtgggtcaaaacaatttggttcttgcagaaagtgaaagacaagaaatgagccgtgggacctgtgctgggtctgttcttcttggacccagtattgctcttaggctgtggaacttgctcttgcttagtaactcggaattggcattccctccaactgtgcttcccaaatgtgggatgggaccactgatgggtgtgacttttggttgcacttgaggtgatttctgaaggtactgtacggatgttaaaaagcattaaattacgtgatgagttagttattctcaattttctttcaatctcagttgaagcagcaaagacttctggggctggaatatccttaacacactagcgcttgttaatttcccctttgtagctaagagacagaagatctcaggcaactggatccagctagaaatgaataacatctattttcattgtgtttacttttatggttaccttccatttatggcaaacaatcttggttttctgtttcctatagtgatgtgtttcctttttaaatgatggatattaaaaagcgagccaatttaaagaaaaatgtgaataatagttgaagtcttcaaatgatgtcagtgtgctaggccagggagcacacttagagagcaaatgctgggtgcagtgaacagtgcctggacctggcttcacctgagactcacctggggagcttaaagatcctggtgcctgggtgtcaacccggaccaagtagatctgactctctgaaggtggggcccagggatcagtgtttgactaaaacatcccaggtgtttccagggtgtagctgaggttgagaatgtctgcccacctatcctggggcagcgtcctcaccctctgactccatatctttttttgggggggtcggggggatagagtctcactgtgtcacccaggctggagtgcagtggcatgatctcagctcactgcagcctccgcctcctgggttcaagcgattctcgtgcctcagtctcctgagtatctgggattacaggtgcccaccagcacgcccggcttctttttgtatttttagtagaaatggggtttcaccatgttggccagactggtctcaaactcccaacatcatgtgatccacctgcctcagcctcccaaagtgttgggatttgactccacatcttgatcacatctttcccttgtttctctcttctgtctctagcccttgttctcatccgcttccccacttcaattttcctcttattttctctttcctagcttccccagcttcccctcttccatcttccttacaactattcctatgagtaatgccccctagcattgcctcttagcctgacattcttgaaaccatacagttgaaaccctgttagaacattaccacactgtactgttttccccggcatttgcttaccactccgtaagctgttggtgcagtttctgcacatctaagattgttctccaccagtaacttgtattaagagcaattatgatcatcactattgtgctctcaccgagtgcctatcactgctctaagcactttacatggatgagcctacataatccttgcttgaaggagatataattttccagatgaggaaacttaggaagataaaatagcttgtccacaaccacagagtggcagagccagaattcaaatgcaggcagccttgccccagatcctacactctgagcagatgggaccctaagttagttgctcgtaatcctgattcaggtgtcctggcatgccatgagtcacactcacacaggctgttctctgctgtgataagaaattgaaatttggacccactatttgcttcaatgacatttagaattgataactctttttattttcaacttaaatggtagtatctcagtaggacactcacagctttaaatcccatcaagattttaactcatcaccattccgaagagatcttacttaaatgattttttttgtgtgtgttgtctgtcaggaatataaattgaagatataaaagccagcacccgcaataattctgcaactggtaggaggcaacccaggacctcttggtgaccttaataagggtcttctttggcttatccaggatgtgaccttctgcagcctccagtattagacattccagggcattttctgccttttaaaaagcatctgattctcattctggtgtttaatcagagagagaccgttggcctctttccattcctcatgggagagctccatttttgtgctcacatttttcatctttggtgatactcagggttgatgttttagtgggctagactttctgcattggattaaaacctttcacatgagcttggtgaattctccagtgaccaagtcccctgggggcctccaaccctatagattccagcatgataagagtggaaaggagtccggaacatcatgcctggggtatagtgagcactcacaccatggatttattttttcattttccaagcccccaaccatgtaaggtattttataaacattattttatttgattctcccaacaattctataccactggaattatgtccgtcttcatttttctagatgaagagacagaggctcagagactaagcttcccagtgctcagggttacatggtgaaggaggcagagtttgcatgtacacctgctgagccacagggaccatgcctatgtgttttatttgtgtgctatctgctccctgagatgaatgaggttagatattttcttaggagaagaaatacttggaaggcacaaatggggtatgacaaactatgttcagcttctctgtggctagcagacctgagctagccccctccccctctgtatttgaatatagtcccatctgttacctacctatgtaaggcttccaggtaaggaggatgtaaggctgttggctggcaggaggcagaacacagtagatccacagactagtaaaggcaatgcctgtctctgacttccgatcttagggctgtacctccctcatttgtgtccaaagacccaacatctttagggttctccccctgcctcctccccatctaaccctgcccactgacaactccagtgccttcttctcaagttcttctgtaattcttaatttaataatcaaactatgctgataaactatgctaattgcctagatctgtggttctgcaacttttatggacatcagaatcacctggaggcttggtaaacacagatcattggacctcaccccagagttctgattcaggaggtgttgccagtgccgccggtccagggaccacactgtgggaaccactgaatcagggagcctggtcccagttatatgtgtgttgatggtgtctgaccagttgggtatctgataattcagccttactgggaaagatgccatgggaagataggaaggcatttgagataggagactcaggcttttgtcccttcatcatagcagtagataattatcttttacgttgacgtgcagtggctttagacagcttctcatggttgtgagcctctgccagctcttaaatctttgagcctgttttcctctgtggatgaaatggcctttccttctaattatttttgattcccatatcaggtttctcaagctaagattgcattggaagcacctggaggtcttgttaaagtgaggattctgagttattaagtctgaggtgggacccaaggttctgcatgtctaatgagctcccaggtgatatagatgctgccggtccatggaccagcaattctgagttacaactgtatacagcagtggtgcttgcccctgctgcccagtagaatcacccaaggagcttttaaaaacgaatacttgagccacattccttggagattctagtttaattctggggattagaatttttaactcccccattccccaacccccatgtgattccaatgtacagtcagagttggaagccattggcctttacccacaaaaagggataacaccttctgggagctcaggtgcgtgtgtggcaccatagaccaggttgggctggtcgcttccatgcagggagggtgcaccattactcctggggagctgcaaaggtcacctgggaatcttgttaaattacagattctgctttggcaggtttggggtgggacctgggtttctgcatttctaatagatatcttagtgttgctgatgctgccagtccaggctggtgctaagtcccaagacccacccacaagggcccacacgatgcccattatctctgccggtggtggcagcgggtagcttttctcatgtcgagtgttagaggcttttggcttccaccatctgtctccttaaacgccattctgacgtctcttttattcagcttggtattgacacaagacagcgggcaatataggtctgttctctttttgtaatattttcttccttctctcttcacagtacgagatgcaaaaaatctaatccctatggatccaaacgggctttcagatccttatgtgaagctgaaacttattcctgatcccaagaatgaaagcaagcaaaaaaccaaaaccatccgctccacactaaatccgcagtggaatgagtcctttacattgtaagtggtctctccttgatcaaatttcattcctatacaccatgcagttgcccacctcattatttgaggtaatgaagtaggttcattataaacgtctttaaacatgtcttcagtcctaagacctcctcaggctgccattagggaggtagctattagcacctgttcgatagatagtaatttgatttatcaagagttgcataattcaggcctcagattattattatctaatctggataaacaattctatttaaggaaatagaattaaggtaaatagaatttaagctaaaaatgtgtcaggtgtgtccacctcttgatggacttaggttcttttgggagttaggggagggcataaggcaagaatttaaataatttttagaccacagaatgagtgagtaacatagaaagtgttattgccactgaaatgggaagatcattcttgccttcaaagagagaagacttcctggaaaaggtgacatttaaagccagcctgggagggttgccaggatttcagaggtagagaaggggaagaaggaaggagggaataaataaatcaggaggactgagtgtagctgagggaaagcaagagttcccctttgtagagtagtatacaggaagcagtttttctgtggacaaccagaaaggtagctgtctgttctagagggaccagcaagctctgctctataaaggatcagatagtatatattttaggccttgtgggtcatatagcctctgttgcaccggtataactttctagtgccaaaggagccataggcaatatgtaaacagatagccatggctgggtcctaataaaactttatttataaaaatagacagtgggatagatttggcccatgggtcatagtttgttaactcctgtagcgctttgcttgccagcataaggggttggtattttactggaccaggaagacaaatatactatttctttatctcaggctcgagtcatatacatgtggtatctcccaagaaaccatgatcaagataacctagtgtttgcatgtgtgtgtgtcttgtagcaaattgaaaccttcagacaaagaccgacgactgtctgtagaaatctgggactgggatcgaacaacaaggaatgacttcatgggatccctttcctttggagtttcggagctgatgaagatgccggccagtggatggtatggaagccgcttaggttgagtatgtctcaaagcatcagaccatttagacagttaggtttcagtctctcaaatgtcagttgaggctggacatggtgcctcatgcttgtaatcccagcacttcaagaggccgaggcaggtggattgcttgagctctgaggtttgagaccagcctgggcaacatggagaaaccccacctctacagaaaatacaaaaattagccaggtgtggtggtgtacccctgtagtcccagctacccaggaggccgaggcatgaggatcacttgagcccaggaggctgaggctgcagtgagctttgattccgccaccgtcccccagcctgcacaacagagctaccctgtctcaaaaatataaaaatgtaaaaaaagtcaaatgtctactgatctggctgtagcctctccgtaggatgcgtttcacaaaaccgctcgactagaggctgcaggaaaggcttgttaaacttgcggtggtaactcttcttctcccgtccttgaaaggtacaagttgcttaaccaagaagaaggtgagtactacaacgtacccattccggaaggggacgaggaaggaaacatggaactcaggcagaaattcgaggtgaggataacaaaatgcccggaaacacctttcctttagaaagcccaacttcaggaacggccgagatgttgtggtcacatttttgaaaagcaaaaaaaaagtaatctcaatgttaatgatctttttctttatttaaaaacatgaatgttgttcgttccctttcctttgcaagctgttgactttttatgactcttaccacttagaaaatggaaactggaaatatcgcagaactgagagcatggttgatttctgcataagagatctgtttgcacatcactggggagagaagcaggctctgagggcaggattgttcttacaaaggaggacttgtgctcttctgaaaaggaggaagtcattttggcctttccttgggagctcatttgtgtgtaatcaggctatcatctgagactttttttttctacagaaagtacaaggttcctaattttgttctgaaagagcagcttaaacaaatatgcctttgtgtgtgatccctttttatttatgctccagatgtttagcaaaggccacctccttctcttcttcctcttggtatttgtgtttgcctctgtcccggattcactggtctttttacttctcctcctctgctccttactcctctttttcttctcctctctctcccttctcctcttcatttaccgacatctcagcttttagtaaacggttcttttctgtaagcaccttccttatgttttaaaggcacaacttctaatatttgtctgtttctctaatcacccttcattttggctgttcgagggactcctagagtagccttttcagtctgtgtaactggttaattccttcgtgaatctttctcttcttcagacttgttagaattccctggaatttccccgctctagagcagtacacgtgcacacgcacacatgtgtgtagatgctgaactgctactgaaatgttgacactaatgggatgctgatgctcctcttttccttcttctgttgttctccaagaaacatacagatctggggggtggggaagagtggtcttggggggataataaacctccttcatgccccccacaaaagaaacatataggtcttatccagagagaatgaatcccaaaggatgtaaaacatgcagttgttcaaattactttgttaaactgatgtttggttaaagttgatgtttgtggcaaatactaaatggcaggggctctttggttagatgtccttgggagcacagacgagtgaaatgattcacagataataaatggcaatgaacggcaggcctcgggattgaagcaggagggagtggtggagactggggtgagctggtaagcttcagctctgtctgcaggtggcagctacggctaccctgccccactcgatgtttctcacaggcgagtccaggccctctattgccggatcttccttcttccagagaagccagaaatccaggtttttatatgatacattctgatttatcttaatgttggcagagttctaatgttaaaacttagaaccaggccctgtgcagtggctcacttctgtaatcccagtactttgggaggatgaggcaggcagatcacttgaggtcaggagttcaagactggccaacatggcgaaacccaatctctactaaaaatacaaaaattagccgggtttggtggcatgtgcctgtactcccagctactccagaggctgagacacgagaatcacttatacctgggaggcggaagttgcagtgagccgagtttgtgccactgcactccagcctgggcaacagagcaagactctgtctcaaaaaaaaaaaaaaaaaaaaaaaaatttagagctgtccggatgtggtagctcacacctgtggtctcagcactttaagaggccaaggcaggcaggttgcttaagctcacaagtttgaaatcagcctgggcaacatggcgaaacccagcctctacaaaaaatagcagggtgtggtggcatgcacccataatcctagctacgagaatcacttgaacctgggcacgagaatcacttgaacctgggaggcagaggttacagtgagccaagatcacgccagtgcactccagcctgggcaacaaagtgagaccctgactcaagaaaacaaacaaaaaacttagaactctgtgtaggtcaaatatgcatctattgctttagacaccagtaggattcaaccagtaagaaccagcttgcagtctctgctcttcaaaaatagagaaaaaataattttaaaaaattatttgtatagttatatatattacaatatgtataaataaaaaggtgcatgtatctgtgtaactactatttgtctatctatcaatagagagaaaagaatgagattcttttcaaagatgctttataatatttagaggaattcaagtacaaagatgaaagtcagggtttggggcaggttcaaatgtctatgccaggcatagctccttttcaatttgtatttcttcccttgcttcattatctgtttccacccctaccctgcagctgaggatgcagacctggggtactggacaggaccaccttcttgagccccatccctgatgtcacaccacctctgtgacggatggatccttctagagagagtttcaggactgagtgccagcattcttcagctgtctcaggcaggggaggaacctgaggagccagaaagaaccttccttaccgaatgttatgccatggtgttgatcacgagcagtcactgggtcaggggctgttgacgcagaaagagtgcattcgagggaggaacagcacgggcgttccccacagggttcctcacagtaatgtctgagacttagctttgctgctggagaaatattgacccactctttgtgcttcattgtcgtggcttcctggtgagtaaacttcctgtttttctgggcaatgagttcagctttttataaaggtcagagttctaaacaaacaaacaaaatacaggccagaggacctgagcaaaacgaagcatttctcttgggaggctggtcagaggccgcagggctgttgctgcttactattcctcctcctgggagggctgtggacttggcaggagcgccagcccaaggctgtgagcatcctggggagaggtggcatcagcagagttgcatggggtggaggctctgctcttcagcctagtgaggtctgtgtttggagcatctacatgaactgcattctaacctttgctttaaatacctttcagcttatagttcctagattttactcaaattacattagctcatttgcttagagcattttaaaaaaacacaactgcaagagactgggcagaaagccactagaggatggcgtcaaaaagatgctgagaattttacgacagctgccatgcttcattttaaatacatattcagatctgattttaggcaggggttcaatcacgtaatggtgttttgttgaggtctataaatgtgagagttgcaagacttccccagtgccaagttactgggaagggatgcaccagggcagaaaggctggcatccacatttgagcagttctgggtagcagccaggctttgcaaacagggtgccatcagttggcatcaggtccaatttgaggcacctctttgagcccccaccccgtttcctccttttcggtctgtagcatgagtgcttcccagtgtctccaggctcccctctctgggccctttctcgccaactaactgccattctaacttgctttccatcacattagtcttttcttccctacccactctttcatagatactttgccaccctccagtaacagtttgattcagctgagtaagatttttttgttaagttcaatgatgaatctgtattggttgaaacacacacgagggttcgtcctgttgggaacaggcatcactcagtgggatcacacagtgtccagtctgtccttatccttccatgtccagccctgttttctaaaaagggttccctccatgcagttttcgaatccttctccaaaaatcaaaagtcattcagttggatgaaagggaaaccaaacgagcatttacaactctgccactgcattagtattcattcgataattaggtggaaagtttttgcaatttaaatggttggttctcaaatcttggcaaacagaatgatcagtgactggagctcttaggagccaaggaatattccagggtggctggagatgaccttcctcgctggtagagatcctgctagagcagttcatcctcctacaagacaaaacaaaccagaaccttgattgcgatactcatggacagtgtgtctgtgggcctttaatctgttccacgtttgtcatcaagtaaagtacacgtggtccctgattcacaaacataaataatgcatttttccatttgttaaaaaaagtaaggtgccagcagtgggctaagcagacagttcctgctttctttggagcttacgttctgtatctatgggccctgctgcaaaaatatttgggaacaaagcagggagcttatcatatcccctgtgctggccagtgattcccctgaatctccaggcactattgaggacaactgagattcctgtttttccctctcactgcttggtctctgctccctgtgatgaggctcacggccagagttgggaaaaggtccaccttgcgttagaggcagtgcagaggatgggttagctctgctcagcaaactttttctgtacctagtcagataataaatattttaggctttatgggccatgcggtgtctggtataacattcaagtctgccgttgcagctcaaaagcagccacaaatacataaacaaatgagtgttggtgtattccaataacacgttacttacaaaaacaggtggcagaccagaattggcccaagggccagtttgccaacttctggtttagcccgtaggctctagaatcaaatcctagtttagtcacttatttactatgtgacctttctgtgcattggcatgcttaactataaatggaaaaaataggtcaggataactagttctgtttttctattagttataaatagaactaatatcctgatacgataggatattagttgttgtcagggaagtaaatataataccacagtgagaagtcagcttgcactgatccttctcgattcaatggtttgatgttgggtcccgattacaaactgaaaagtaggcacatataaaagatgatttggccaggcgcggtggctcacgcctgtaatcctagcactttgggaggccagggtgctggatcacgaggtcaagagttcaagacaagcctggccaagatggtgaaaccctgtctctaccaaaaatacaaaaaattagccgggcatagtggcgggcgcctgtaatcccagctactcgggagactgaggcagagaattgccggaacccaggaggtggaggttgcagtgagctgagatcgtgccactgcactccagcttgggcgacagagcgagactctgtctcaaaaaaaaaaaaaaaaaaaaaaaaaaaggatttgatgtaaaccacacgaagaatcaacacaagtataatcataatgattgttgcagctaataattcattagagaagtgattatgttaacaacagaaacgtcacagttgattgactactgattgcattcacatgaaggtccagtacttttgttggtgtaatattgccctctgatcttttacaaaatctgggatctgaatcattcacatcttgagctgtacccaggaagttacatgctacattcacatttccaatggttaaaaaaaaaaaaaaaaaaaaaaaaggtatcttctagccacatctttccctcttttaagacagttcccgaagttcttattgtcatttgcatttcatttccatggcttttagtaagcttagtatttttgtttcttgtttatccgtcagttgattctttccctgagcctacttgggctacatctaccttcagagccttggagttgtcctagaatcaagaaaatgggctgagaggtaggggaaggggaaaggtgaggggaagggagttctgggaccagtttctaggcctgcctgggatccagccatttcctatccccagagttacattccttcctttcctcagcgccccttcctcttgtgcagagcctttctcctaagcttggcccctcttccctagggctgtttactctgtccaagaccttcttccccaatcctgcaacctcaagagaaatcaagccagaagggcaaataaccccagccatggacctggctccctggggctgagggcacttcaggacaagtggtgaagaccacgtctcccttctccaagcttcagatttcacaaaacgaaacatacgtttgctcattttgctccagtatcacaatgactacttttaatttgcattttgatggcttttagctgggaatggactttcaacgaactcatttctacctgtagggttgcttatctactccatgtgctgttaacagttaatggagattctaatattaaaaagtcaagcagctttccttaaatgagcctacaccattcaattttgctcaattgtccaggctttttattgtttttgtcatttattatttcgttcatcatttaaaaaacagagcaaattaagaagctaaaagcgccttggccttttcctcctcttactgtaaccgtaacttttgctgcacaccattgctctattccagagcaagttaaacatctaatatttaaaaagccaaaaagaaacttgtagcagaacaaagatagctaagaggcagcacacctggggctttgtctgcgatgggatatttctgttgtcagaatgtaatgaaaaatgatgtcccattagaaagctgatggataatatatcacatattactcatttgagtatcaggacccaagaaaacaagatgaatttatttaaattgcaatgtcccttgaagcttgtatgagctctctaaagggaaatacttttaaagttcttataaagagagaaatttatagccaagtgtgaaaaatgaagtgcagttttgaggaccagttcccatcctgtcccttcctggggagcaagaggtgtgatgttgatggagcagtgatgaaagcagggggaatcatggcaaacacccgctgtgtgatgattagatgctaggcagtttccgtgctgggcatcgtatattcctttcatttgagaagtggtattgcatagtggttagaagcctcagtgttggacccagacttctaggttcaaatcctgccccttttatatcccagttgtatgacctgggacagattactcaatgtttgagcatggtatttttctagaaggaatatgcaatttaaaatagccatagtttcatatccctgctctaccacttcccagctgatgatcttggataagttccttaaactctctgacctttgttttccttgtttacgaagtggagatgataatagagactgccgcataggactgctgggaggattcactcagttcacttacgtaagttgcttagactagtacctggcatagagtaagtgcccaataaatgtttgctaattatatgaaatagacatgatttgcccaagtttggttttgatttatatttatgaaaagttatttatctgtgcaaatgaggtgctaccaagaggtaagagcattcttagaactctgttttgagcattagaaattgttatcaaggacttatttctgagaacagaccagtggattggttgttccaacatttatggtttcttagaacctgaagctaaacccgaattctgctatcttgatgacattttcagcagacaggcttcccagttcatctctgttttcacccactttctcctgacacctggcacccaggaggctggggaaagttgtttgaacttgagtgcatacgtgatcgagagctttggcatctgagagacctgccttttgtccctgctcccaggttgctaatgccaccttggcctgactccgccgtaagcatctgtgctctgccttagaacctcaagtcaaccccctcataattaatctgattttccccagtcatagaccatcgtcatcacacctcgcctgtctcctcagagagtcgagaaagccttggaaattcttcgacccattagacaagtcagcccagaggaacccagtctgtctacctcttgtgatttgaagcacattgtcagctaaataatcacataatcataaattctaaaaagtaaatagctacattttgccttatcttgaaaatcctctagagccacactatcccaatagaatctaaagctagatgtcagcacagtggtggaataggagctttcaccatcattcccctgtagacgcatcaatgttgacaactacctatggacaagagtgtctttgtaggagtctaggaggccagcagagaagtttcagaacactgttggaggaaaaacatccacaaataaacacattgaagagggtaggaagaactagttttactttatctgtattacccctccctcaaagcagcactgctcagagccaagagagactctctcacctgtaattccttctaagggggaaagcaagagcatagtaagtaagcacccagctcccccagccatccacaacactgcccaagagccccacttctttctcacctcacccagattgctgagataatcagcatggctgagagattgggagaggctgagagcaggaaagagaagctgctggccctctgaagtgttctacagactccatcaggaagcccatccacgagctgcttgagacacctcatctactgttcccaaactctacaccccccacccccagactgagtccctaaatgtgcccccatggacagtgaatgcaagcgtattatgtagacagccagctcaactctgtgggattgggagaaggtacacaaacttgagtatttcaggacaccatcctagggaaaacaaacaggaggctcttagcacctaacctagctttgcaggattgaaagaaggcatgcaaagtcaagaattagccctcaagagggaaaaagaaatgtagagcaggtgcatccatagaaaaggattaagaaagtctcattatccatagacaggctgactggtgaaggcatttctctcctgatgccagtcaataaggattggaggaggagatgactgcctccttcttcaaatgtgaagacagcatttgaagcaacaagacttcaaaggacagcacttcaaggaacatgaaaagttaaggagccatgacatcacaaaggaacacaatattccagaaagcaactactaaaaaatggagatctaaaaatgacctgacaatttaattgttttaaggaagctcagagagctagctacaagaggatacagacaacaaaatcagaaaaacaagagctcaataaaaagattataaatcatttttaaaaagaaccaaacagaaattttggaggtgaagaatacagtgaatgaaatggaaaattcaatagagagtgacaacagcagatttgatcaagtagaagaaagaatccatgaacttaaagacagctcatttataattaccaagtcagaagaaaacagaaacaaatgaaaaggaatgaagaaagcctatgggatttatgggacaacattaaaagggctaacatttgcattgtggaaattctagaagggaaaaagagaaaggggaagaaagcttatataaagaaatgatggcccaggtgtggtggttcatgcttctaatcccagcactttggggagactgaggcaggtggatcacttgaggccaggaattcgagaccagcctggccaacgtagcaaaaccctgtgtctactaaaaatacaaaaaaaaaaaaaaaaataggtgtagtggtgcatgcctgtagtgccagtactcgggaggctgaggcacaggaatcacttgaacctgggaggcagagattgcagtgagctgagattttgccactgcactccagcctgggtgacagagcgagactgtcttaaaaaaaagaaaaaaaaaatgtctgcaaacttcccaagtttggagaaagatatggacagtagaaaaggtaagcaagccaggcacagtagcatgtgcctgtagtcccagctacttagagggctgaggcaggaggatggcttgagctcaggaatttgaggctgtggagcagcttcgattgtgcgtgtgaatagccagtgcactgcagcctgggcaacataactagactgtctctcaaaaaaaaaaaaaaaaaaaagattaacaaaactaagagttgatttttttgaaaacataaacaaaattggtaaacctttagctagactaagaaaaaagagagaagaccaatgaataaaatcagaaatgaaggagacattgcaactgatactacagaaatacataagatcataggagactactctgaactgttacacaccaacaaattggataacccagaagatatgaataaatttctagaaacatacaacctaccaagactgaatcataaagaaatagaaaatctgagtaggccaataatgagtaaggaggtggaaccagttatcaaagatctcccaggaaagaaaagcccaatgcctactggcttcactggtgaatgctaccaaacactttttaagagacaaggtctcgctctgttgcccaggctagagtgctgtagcacaatcatagctcactgcagctcaaactcctgggctcaagcaatcctcctgcctcagcctcctgaataggtgggactacaggcatgcaccaccacacccagctaatttgtagggatgaggtcttgatgtgttgcccaggctggtctcaaactcctggcctcaactgaattcctagcctcaaggcttgtcctccctttgctgggccactgtgcccagactctaccaaacatttaaataagaattaataccaatccttctcaaactcttccaaaacactgaaagggaaagaacatgcctgagttcattttatggggccagcatggccctgataccaaatccaggcaaggacatgacaagaaaataaaattaaaggccaatatatccaatgaacagagatgcaaaaattctcaacaaaatactatcaaaccaaattcaccatcacatttaaaggatgatatgctgtgatcaggtgggatttattcctgtgatacaaggatggtttaacataaaccaatcaatgtgatacacaacattaacagaacgaaggataaaaattgtatgattattttaatagatgcagaaaaaggatttgacaaaatttaatgccctttcaaaataaaaactctcaacaaattaggtataaaggaatgtacctcaacacagtaatagccatttatgacaagcccacagctaacatcctgctctatggtaaaaagctataagttctttctttcagatcatgaacaaaatgaggatgcccattctctccacttctattcaacatagtcctggaagttctaccaatgcacctaggcaagaaaaagaaaaggcatccaaatcagaaaggaagaagtaaaatagtctctgcagatgacatgatcatatatatatatagaagaccttaaagacaccaccaaagaacttgttagaactaatgaacaaattcagaaagttgcaggatacaaaatcaaaatacaaaaatcagttgtgtttctctatgctaacaatgaactattcaaaacaatataagaaaacaattgtgtttacagtagcatcaaaaagaacgaaatacttaagaataaatttaaccgaggaggtgaaatatctgtacactgaaaaatagaaaacactgatgaaagaaataataatacctaaataaatgggaagatatcgcctgttcctggattggaagaattaatattgtcaaaatgtttgtactacccaaagtgatctacagattatacgtaatccttatcaaaatgccaattattagtataatttgtttccatagaggaaaaaataatcccagaattcgtatgaagccacaaaagaccctgaatagctaaagtaatatggagcaagaaggacggaggtatcacactttctgatccaaattatattacacatctataataatcaacacagtatggtactggcatacaaactgacatacaaaccagtagaacagaatagaaaacccagaaataaaccccacacatacgtggtcaactatctttgacaaaggcatcaaggatacagaataaagcaaggatagtctcttgaataaaaggtgttgggaaaactggatatccacataccaaaaaatgaaattggatagatgcatttcgtagcatatacaaatgtcaactcaaaatggactgaagacttaaatatgtaaaacctgaaaccatagaactagaagaaaacatacttggggggaaagcttcatgacattggtcttgacaatggttttttggatatgacaccaaaagcactggcaacaaaagcaaaaataaagaagtggtactacatcaaactaaaaagtttctgcacagcaaaggaaacaaagcaacaaaattaaaaggcaacctgtggaataggagaaaatatttgcaaactgtatatccaataagggtttaatatccaaaatgcataaggaactcatataatacaactcaaaggcaaaaataaaaaagaaaacccacagattttaaaatgggcaaaagacctgaatagacatttttcaaaataagacatacaaatggccaacaggtaaaggaaaaggtgcttaatgttgcttatcagggaaatttaagtcaaaattgtcaaaattataatgaggtatccctgcagacctgttagaatggcagttatcaaaaagtcaaaagataagtgttattgaggatgtggagaaaatgatatacactgttggtgggaatgtaaattggcatatcagttatggagagacagtatggatgtctcttaaatacttgaaaataaagctaccatacgatccagcagtcctgattctgggtatatatccaaaggaaataaaaatcactgtcccagaagagatatctgtactctcaagttccttgcagcattattcacaatagccaagatatggaaacagtgtgttcattaatagatgaatgcataaagaaaatgtctgtcacatacatatctcatttatgtgtgtgcatattcatatatatatatatacacacacacatatatacatgtaaaggctcaattgtgtatacacatatatgtatatgtgtgtatgtgtgtgtatatgtatatataattgagtctttaaaaagaagaaacatttgtaacgcatggatgaacctggaggacattatcatattatcatctaagtgaaataaaccagacacagaaacacaaatagtgcatgttttcacttatatgtggaatcttaagaaagtcaaactcacagaaacagaatagaagtgtggttaccatgggttgagcagggtgttggaggaatgaggagatgttggttaaatacaaactttcagctttaagatgagtaagttctggagagctaatgtacagcatggtgaccaataataataatgtgtttttatactagaaatttgctgagtagatcttaaagattctcaccacacacacacaatggtaactgtaaagtgacagatatgttaattagtttgattgtagtaatcatttcacagtggatatgtacacaaaacatcacattgtataccttaaacaatgactaataccattttgttagtcatgcctctatacagggatgccttctgaaaatgtatcactaagagatttcatcatgcaaacatcatagagtgtatttacacaagcatagatggtataacctattccacacttaggctatagggtgtaacctattgcttctatgctataaacctgtacagatgctgactgctgtaggcaactgtaacacaatgctaagtatttgtgtatctaaacatagaaaaggtacagtaaaaatacaatataaaagaaaaaaagtggtacactagtatagggcacttaccctgaatggaggttgcaggactggaagttactctgggtaagtgagtgagtggtgagggaatgtgccagaacaatactgtaagccaccacaacacttaggctacactcaatttatttttaaaatcttctttcttcagtaataaccttagcctacagtaactattttactttataaacttttaaaaaagttttgactcataataacacttaaataacacttaaaacacaaatacattgtatagctgtacaaaaatatttttatctccttattctatgtctatttaaaaatttaaaattttttttctgttaaaaaattttttttttgaccctacacaggtcaggatcatccatatggctgtccctcacctctgcatcttgtcccactggaaggtcttcaggggcagtaatacacatggagctgtcatcacccctgataacaatgccttctggaatacctcctgaaggctctgcctaaggctgttctacagttaacttttgttttaataagtagaaaaaaataagacctgatgtggtggctcatgcctataatcccagcaagtttgccaggccaaggcgggtggatcacctgaggttaggagttcaagaccagctgggccaacatagtgaaaccgcatctctactaaaaatacaaaaattagccaggcatggtggtgagagcttgtaatcccagctacttgggaggctgaggcagtagaatcacttgaacccaggaggtggaggttgcagtgagctgagatcgtgccattgcattccagcctgggtgacagaccgagactccatctcaagaaaaaaaaaaatagaaaaaatatactcttaagataacaataaaaatatagtatagtgaatacataaaccagttatatagtcatttattatcgactgtgatgtactatacataattgtgctgtatttttgtgtgactggcagtacagtacctttgtttacaccagcatcaccacaaacatgtaatgtgttgtgcagcaatgttagtgtctgtgatgtagacatcactgggtaataggaaattttcatctccatgataatcttatgggaccaccatcatttatgcagtccatcgttgaccaaaatgtcattgtgtagtgcctgactataaaacctttttctacatttataatctcagcaaagttaaaaaaaaaaaaaaaacaggaataggttaagttcagaactgggcttgaatttaaaatccccactattaacaccaccactattgatttggtttcacttaaacatcatcttctgtcccataaattagtgctgttatttggaaatgtgtctataacacttcgctcaattttaatttgtatctttattatagctttagagttgttagtgtactagtacatatattaaggcttatagttatctgtacatacatattctactaactctataataaaatttgttaacacatggagcaaaaaaataatctcaagctagcttaacaatggcttctgtccaaactagacccccagtaatattgggatgactgaagtctcatgcagagaaatatgtgtgtcttcacagttcttatatttgtgaccattcagaactatatgaagatataagccaaaagaaaattggtgatcttgaatgagctgttttgtgaggattataagtccagatactacaggaagtatcaccctggattcagattgcctgaaaaatcaaatgtgtatctgtttttacttattcaagagaaatattttgagattatccttcttactaattaacaaattaatatgatccaattaaactataattaaggtacttaaatcaacaaagatgagactctgttgctaggttatatgtggaaagagcaagcaagcatttttctcttttatcagaattagattttcccaaagcctccactgtctttgaagactttatctagttcagaatgctctcttccagttgggggaaaaataaaaccacaaaacacagttcactagagaccctcagataaattgtagctatttgttgatctgatcagccctgccacggttactatggaaaccagagtactttcagatgaccttttagacacaaaacaaaaaaatctatgtgccccaatatgctctctgcttttttgtccctaaatagcttacttaattacttccttaactgtgtgatgttaagggggaaaaaaatctataaaatgcacagcagttgaaagagatattttaaggcttatccttcagctttgtcttagaagcaaagtcttaaactgatataggagacaggttagtagtagaaatcattttcaaacactcattagatcactgccaacagaggttaacctggcattcagctgagcagacccaaaggaagcaagacagcctctgaaagcaactgtacagaatttctcatgagtctgtaagggagggtgcatgcatttatattagagtgctggcagcatgctttcagtttaatttgtctcgaggaaataattttgttgggaaaccaaaaaagattgtgcattctagttgtctgtctaatgaattcctgaaacagcataaaagccctgtgtcttgtagttacagggatggccttgtgggtggatgttgctggttgaagaaatattagttaatatcacacaagcctgttattaaatgttagaggcagctttgcaaatgtccccaggccctggtacccacaggggatgagcaggtaccaagggtgccacccttcatttacaggaactggaaggagggaagacagagccgatgtccactggcactagcatgaacatggcagctaaacattggcacaagtcttcatggctctatctcaagcacctaagaggaaattaaagccccctaaaataaaattaagggacctagaataagggtgacaccaaacataatgctatttgttgttttccccaaaaaacatgccctacagagaattaagattgcctgtccctggagcggtaaatcgcaagggttctgacctccctgggtatcctgaaagaggaagtggcgagcagcttgagctctagatcttgcacctccaagtatgggagctgattaataatgcagaggttcagagcccagcccagcctctgacccagtcagaatattattttaacaaggtccccaggtgattcctgagcccattaaagtttgagaaatgctggtcaagaagatgaaacctgttgactgatgagtaaacaaattcagtctcctgtggtcgtaaagacagcaaggatagacttcatcacccccagtacccatattaaatagcgaagggatcagtgaactgtgacccacacccaaccacctgcttttgtatatacagtctatgagctaagaatggtttcaaggctgggtgcggtggctcacgcctataatcccagcactttgggaggccgaggcaggcagatcgcaaggtcaggagatcgagaccatcctggctaacacggtgaaaccccgtctctactaaaaatacaaaaaaaaaaaaaaattagccaggcatgatggcaggcacctgtagtcccagctggaggctgaggcaggagaatggcatgaacccgggaggcggagcttgcagtgagccgagatcacgccactgcactccagcctgggcgacagagtaaggctctgtctcaaaaaaaaaaaaaagagtggtttcaggatttttaagtggttgaaaaaaagaaggatatttgcgagacatgaaaatttggtgaaatccaaaatctggtgcctataaatagatttttattaacacaactacattcattcattcgtgtgttgtccacagctgttcctttgctaccacggcagagttgagtccctgcaaaagagactgcatgggcctcaaagcctaaatgtatgccctctggtcctttacataaaaagtttgtgacctctgggttaatggaataatagggtattcaaactgggagagatgtttaagattgtgtttgttgatggggaaacaaaagcaaaagggagtgtgttcaaagcttgttagtgcaggacccagacctcctgtgtgagttgatgcttctgactcataccctgtcccttcccacacacccttccctatgacacccccttttctgactcctctccattcatccaccatgctcattaatgcatctcagcccatgcttgtgctccttggaaagaccctcccttctcctccacttccgtcagtcctaggcttttcaaatcctacaagtccctttatgtggttctctggcctcttaaaattgccttgacttacgcagtctaaagactactcacttgccagacacacctgtaagatgtgtcaccttcctgattccagagtaagaacctcaggccctcctctgaatactttgaagtctaaacatcaggcccatgaggagtccacccttcacctgcacttttttgacagcccagaggaaggtgtctgagccaacatctttatgaggctggttggaggccttcaggggagaggccattttagagccacgagaacctccctttcttcctctagcagttgtgtaaaactcacgtgtgtgacaaatctggttgctcttgaagatggaccagtttctttcccatacattttatggttccagaaatcagtaattctggacatttctaactggtggatgctgcatctactctgtgtcaagcactgtccctggggctagagacagaaccttgctcttgggaacattgtggagtagtactaagggatatgagaccttgtaccttatctccactttctggaaacgacccctgaccctcatagtggagggaagcttacaccctgtctcctaaacagtagctagcctagatcagcgggagtctgacccaggccacaagtcagttctttgtccacgtagcagtatctccagctcttgagatgctgagtaagcctcactgctgaaaagattatggctcgcctgatgtaacatggcttttataggcagctagaaccacagaggcctcagagaattcaaaatcacagctccctacatggggtccaggaacgtgtggccaaggtgctcatggtgttgtattttggttttagtttgttttcagggatgaggcctctttgcccattaggactgtcgccatgatgtacacatgatggtggcacttcccagttcatcaggccgaccaagtggggccatagatgtccttgttcaggaattcagggaactcggtggctgtcgtgtcttcagcacttaattgaaaacgaagtggttaacatttggcactagtgcagcttcctgccatttgccactttcaccttgagcagaggtgttttgcttcctcatctcccttcccagcatccaggtgtgtggtccgggaaggattccctgggacctcttgcagatgtgtagagcaagaggtgctgtgcgtatctgggctgggtcacttcagcctttcctttgatttttttttcccagagaagatttgggatggtttgtcatgtccaagtgtgaaacagccttagagttctttctaggtccatttgagtctaagaataactacccagtggctgccggaaggctgtgaagccacatagcaattgtatcaaggtgtctctgctaaatgttttttgtctccctgtagaaagaagcaggtgacctattgcagatggcagttggagataggaacctcctaaagtcatgccatatacttctcagggcatcccagctactcaatacagagtaccctatgcctatagatatccaagcaaagatcaggcaaccctctgagaaagatgtaggagaaatgcctgattaaatttcctctaaggctctgtccaataccaagattgcaataagggtgtttttgttgctattgttagttccctttaatcttgatgtggattaagatcgctatcctaaaatagagtttttggggttggaacaaaatggcctattttaggaacaatcataaatggatttgtgattactgacttttaaaggcccataatgataaattggaatagaagataacccatacctggtaaaagagatgcaaaactcatgatttgactagtttctcattttagtagacaaagccttactgagcacgtaggattggtttgcctctgatctcctctgttcaggttcagggctgtgatgacccattcaggctgtgggattttggttcagaaatctgatcatctgatccctctcaaattctctcctggaagccacctctcactgcttatgaagttgggggattacccctatgaatccttgtagagaagtctcaccttcatgaatccttgtagagaagtctcttttgagatgatttctttttttttttttttttttttttttttgagatagagtgttgcttttgttgcctaggctggaatgcagtaacacagtctcagctcactgcaacctccactcccgggttcaagcaattctcctgcctcagcctcccaagtagctgggactacaggcttgagccaccacacctggctaattttgtattttagtagagacaaggtttcaccatgctggccaggctggtcttgaattcctgacctcaagtgatccacccacctcagcctcccaaagtgctgggattacaggcatgagccaccatgcccggcctcttctgagatgattttaacttatttttctcacattagtacttgagaaaggaaagttatccagttaagataggtttttttttttccctttttctttttcggtggaagttgaaagtaaaaagaaaagcaaaccctggttgtgtggcattcagtcaactggagcttggttaactcactgcccaccagcttatgtttcgtcagtcatcttgggcacttccaagatattgaagagccttctgaatcatcaagaaaaaacaaaatcttgttactaatagttttcatggtaagcgggtttggtttcatcatcatttattgaaaaatggcaatctgtatataacattactgggcaccttgctatgtgctacctcaaacgagtcgattcgccaaatactccaggaccccgtcatgtgaactggccgatagcaaaacacatccctgaatgtagtggagctgtttgatgtgagaccactttcagacatggaaatgccacaaggaggagagaagggtcctgtcctcataaagcttgattctaggcctttcactattcaaacaaggaagagttacttcctacccctccaagggtcaaatgagacctgcacctggggtgcctccggagcagagtgcactggaaggttcaccgcaccttctctcctgaccctggtgctgtgtctcggggtcaccgtctgtctgctgtgcctgcctgcatcataattggaacctgtgctgtgttgtactcaatctcgttttctcacaccactaattgtgtgtagcacttcctgtgtgtaacatttctcctactaacctggcagtttttctcctcctcctgtcttttacagggctgtcatgtccgcttcttaaaggtagttcttcctctgctctttcctcatccactttccttccacaaaacacttgccttggtttttgtggctcccgggcctcagcctgcagccatgctctccacccttaaggatgcaccgcgtgttctggtagcttgaatctcacacctacttgtgtcttagtctgtgtgctcccttccaagcagccacggccctcccatgaaaaaaaatgccatgtcttaatcacccagagaatagaccagtctcccctcctcttcagattaggttagtttaaaattttacctgctgggcacggtggctcacacctgtaatcccagcactttgggaggccgaggcaggtggatcacccgaggtcaggagttcaagaccagcctgcccaacatggtgaaaccccgtctctaccaaaaaacaaaaaaaaaaatacaaaaattagccagtcatgatggcaggtgcccgtaatcccagctactcgggaggctgaggtaggagaatcacttgaacccgggaggcggaggttgcagtgagccgagatcgcaccattgcactccagtctgggtgacagagtaagactccatctcaaaaataaataaataaaataaataaataaataaataaaattttaccaagcaaatatcaaaacctcctatcagtgattaaagttcaagtctgtattgaaagcatccatccaatgaacagaaagagtgcatctttaaatggacagctcattttcctttctttctgttaatatctttcaatcacatatgagttaagattcattttaagttttataggcatacatctgcattagcatgcaatcagtatggtgtatttacactacatgagtgtgttcatatggatgatgtagtgtaatatatcataggctgaaatcctgtaattgttctgatgttcttaatgcctgacttaatccttctcactcttatttcattttttctcattttttaatgttttcccaactcaatcgttgcaatctaatcaaccattctatccccaaactatggaggggaattttgcaacttgcatgtaaatggttttaaaaacctggtctattattgtcatttctgatagcgccactctcttctgggaagctggttagggccacacaccagctgtgctctcagcgtattgcctgtgttcgtaattaaaatcagcccaagattgtcgcagtgcttttatgttcgcattagatcaaactggaaaatttaaaccctcaaatgctcgggtggaggatttgcaaggggagaaaccctactccccgaccccaagctggaatccacatctaatgctctctcaaaaacactgtcctaaagacagcatctaataaataatgtttttagagtttctcatctctagaacttgtatctcaccctgcagatgtgcctgttagaggaaccacaggagatttgtgacctagagatactggaaatgagaaagaaaaaaaatattccttgaggtttcctaagtcttgcagagtgtggtaaatactgtgtgtgaaaactgcctttcaaggcttctgttgttactgccccccctccaccccgcccttgtctgtgtttgaaaaccctgtcccatgattcaatgcagggtgttgactttggatacacatctccagaggctggccacacctgaatacactgagcctctgtgcaacttcttcctgtggagtaaaaccctccagcattctcagaggaaagaggcacctcttgatcactccaggaggtggaaacagttcctgtttaaaaaccaagtaaacccctctcattgcaccccctgctacttcagaggaacacctccactctgatggaaggaactcgtacttgggtcctggaaccctatttgggacccaaacctctcccacttgtgtggcctgacgtgcctgagtgctgtttgtgtcctttttattatgttgaaaactttgttattccaaagaaacatctgaatcacagagcttagtttcccagcatgtcggaaagctgggtgctggtgtaaaaaactcagatgtggctgaaaagggaagtaatgagaggggagaaaaataagaagaaagagttagggtgaggctttcacctccctgggttcttgcctggctcctcctagctctaatgaagggctgtccctgtccccttctccttaaagactgtccctcttctcccacctgctgggcaacgtggctgtcacctcgtcattccaagaaggcagcagggtgtggcgaggaagtgccacactgcctgggttcaagggttcaaatcccagctccaatatttcatagctgtatagcctggagccatgcagctcatctctcttgcctcagtttctccaagtctaaaatggaaatggtaaaaggaccaacctcctagggatgttgggaggattaaatgagtaagtatggaaggtgcctagaacagtgcctggctagatttgtgtttgctgcagtcattactcagccttttctctgccttccatccccaggaattatgaattacagagttttccctaatggaggtgtcactgtgcattgctggtttccaagaagccattgccaagttaaagtgaaccctttgttgtccttttttttttttttttttttgagatggagtctcactctgttgcccaggctggagcgcaatggtgcaatcttggctcattgcaacctccacctcccgggttcaagcaattctcctgcctcagtctaccgagtagctgggactacaggcacgcgccaccatgcccggccaatttttttactttttgtaaagaaggggtttcaccgtattcaccaggctggtcttgaagtcctgaccttgtgatctgcctgcctcggcctcccaaagtactgggattacagtcgtgagccaccgcatccgacctcattgtgctttctaaaccactcccgggccccagttgggagaccccggttgtacattaggtacaaataacccatcagataggaatctgctccccgtaccccaccctactcccacctgcagcagtgaagcaaggccatcttgaattcatttaagaacagagatgagaagtgtcaagtcaacaaagtctcttttctgacatgttttgtgttggtgcttattatgtttcctgtgtggttttgttatgaggacaagaaacaggctactctacctgagaaagaaaatgtcacccgcatgttggaaattcaccctgacccaggcagtgataatagcgtgccaccgctcgctcacacctctcttcaaagtggcttccttggcttggtcatgagctaatctttaccttgtggctttttctgaaaatagacttgtcaacactcagtccgagtctggcccccagtcactggttttctctgttgacaggctgcaaagaatcatgcaggaagggctctgtccatgaattcccaatggtcatgggtggtcagccagctcagagctgatggtttgggtgggggcaggcaggacacagccatagtctcagctcttactaggggtattcgttttgtgactcacattcccccaggtgctcacagcctgtagatacccttagggtcacaataattgtattaatttagactccctggctctctcctggcccattgacaaaacctctgttcacttccaaagcccagcagttgcagctgggagatcccaggagtatctcgtgcggtggtgaagtgatccgatcacacacctttcctctccggtgtgaggccctctgctttgaggccacttgcatcccagccatgttcccccccacccgctgcttcctttggggagaatgcccccttgtgagtccacgcccccctcaagctgccaggcctcatgcatggggccagagagctagggtgcaaataccatgtgtaaagggaaaagtgtcctgacctcagctgcccttgtgccctcaggcctgtgcccaccgttggagacaggaaacacctacctccaccttgccctcaggcagcccctcctgctggagaccagctcctcagtcctgtccaagtcccctgagggcagctgggaagcccctgtctttttaggagaggtctcactgttccaccccctcgtctcttcccccttcctggaatggaaatttgtcttctgacgctgccacctggcagcaggcgatggctgtggcgagactactcagaatggcagcagccaccagccccgagctctgatcactccctcaccactgcaggatggcgaggctcccaagcctgcaggacgagaaagggagtgttgacccattttacagatgaagaaacaggcctcagagaagagtgcagtgcctttactggtgtcccagaccgctgctggcagaccccagatcccatgcttgtcaccttcctgagcgcctagtgagctgcctgacacagagggcccagagaatagcccagaacagtgcagctgctgctagccttggaagcaggtgtcccattgagctataattaggccccttggttttaaaaactggtgtggattaaaaaggctcagtgagggtaggatgaaatcaatgattatggaaatattgtgctaaatttaatgacagtcggccctgctttcaaattgcttgctcctgtcagagacattttataaaaattttccgttgagtagttgagcagtgtatccagcatttcggggataggatgtgttttgttttttggtttttttttttttctctgtgaggatgcccagtcatcctgtttttcctttctgcagcagctgcacagccatggagggaaggctctggaaccttcttccttggggaactgggttttattgccagttatagcttgggtgcgttttttgttactgttttttattgacttcaggagctgctgttctgtgctcgcttagcttcaattggattttcccagaagtggctttttcattgaactctgccctcgtgtaactgtcgttacttctcactattttccaggtcgttctttgtttctaagataaacaccgtggctccctcggaccactccagggccccctgcagccctcactgcctcccttccccccaggccctttcttggatctgtggcttgcagagtctgcacccagtcaagggtttggaaagattcgggagacacagaaaggcctacaactgtttggatctttgttttctagaaatagagcacccagagatcttaaaacccacttttggcatctgtagttccgttggcactctatagttccgttggcattttgcaaagtcctggcacttacgtgagtgattcaggtcatctactataaaggatacagttttttttttgcatctgcgtagatacaattttgtgtcttgtttgtgccatcttgccccatttactgggacttcacctcggtaaggcagactagtgaatcttaggtggatctctgctaaaagatcccagccaaactgcagttgcttcagaaactgaataccacaagagggcagtaaagatttgcaaatgaaagattccatgacacctgcacacaacaaacagcaatcaactgttgcctggatgtctttacattttagtggacatagagatgagatcaccaccttgtgctccccattgcttcttggctttagaggatcttcagtgtgctgcaaagaagtcaagggtttcccaagagctggatggctccttcagtctattcttgcttgcactgggccccagcccattttctatctccccgggtttttttttttagcaccagagaattacccacttcgaagccatgttgctgacagtctgaaaaactatttactttgatgatgtttctgagttcatgtgattcttgaccctgccacagccaacccataaagccagtgtggtggtaattccaaaggggagcattcgagcaggaaaaggaataggtttccaaaaatgattaagtgcccaaagttctcgaacaatgctatgtcatggctgttgcagtgcgcactgggccttcctctaagccgggcatcagacgcaagtgtgccatcagctagctccctggtgggagaaaaacattgttgcagatggaaaaacttaaggtcattggtggggaatcctcatgtaagcctggagatttagcaattggggagaacgcggtacaagggcaaaccgcctttccaggaggtgtttagcaggtgagacaaggcgtgcaccaccaagattagcgatcctaacagatgtgtcaattatcaacagacaaatctgggaaacagggaaaaatttggttggctgcaaagaaaatcacacaccgggatactagaggtgaatattatgtggtatgaaaagaaccaagcacttcgcagtttccacatctggcaaagtgccaacacgtcagggtcccacgtttctccttggagaatggctcagttgccatgacaacggaggccctctcgctgcctgtgaatttattttaaccgtggcaacagccaaagtgggtgtgtccatgaaaatatttcttgttaagaaaacgattgaatgtgttgcccttacattttgctctgctgaatacatacttcattcaccaccattgtatggctgcaaaatttccttttcctgtgctgcctggcatagcaagcattgtggaagagcctgaatagtgatttaattctagtgctcttgagattcttaattgtcgctgttgtgatagattaagaagatacagacattgtactgaaatctaactgcaaatgaggatgagtgatttgagaacctgcgtgatacagggcaagggtcatcgaactgcaatccacagcccagaccccagcggctgcctgtcttcaccattaaggctttattggaacaccttccctcctttactcacttttgcagctttcgagctacaatggcagagttggagagttacaacagagacagtatttggcccacaaagccacaaatatttactatctggacctttacagaaaaagtttgctcaccctcgatgtaggaggaagagcactaggttcaaaggctggagttctggattcagagctcaggatggaaaactgatttagacatatcgcggtgccccctgggctcattctcctcatctgtaacatgggcagccttgatgagactatccccaagttgcttttgaattctaaaagctctgtcatcctcctgctgttagtcaaagattacagcccagatggggcaaccttagcacagggaaacgtacgggatgatccagcatctagtttcagggcctctgtagagaacagagcgtccttctcttcctccaccagcactgccacgaagcggcgcagaggctgtggtgaagttagctctctagacctcagcatcttcatctgcatcctaggcaggtcagactccccagggacccttctgtggctgacagtctgtggttctgaggccctcgctgcagttgccagcaggagaaagaatgactcatgcctgtgatttgctggtcacctgtgattcccgcctccgggagaaaactccaagtagcaggtgttgacccagttgtgtgggaggaatcacccaggcccttatttccaggttgcacttacagatcggattgtgcaaccagaaaaatgccgtcagaaggaagtggggtggcttgggggactgacttactaaggatcactgttaagctctccatacaaattagctccccttctgtcttagtccactcgggctgctatagcaaaataccataaactgcatggcttacaaactgcatatgtttctctctcttagttctgaatgctgggaagtctaaaatcaaggcaggtgaggtgtctggtgaaggctcactttctgattcacagatggcatcttctggctttgcccacacatggtagatgggatgaggagcctctcaggcctctttttattaaagtttttattatttagagacagggtctcattctgatgcccaggcgggagtgcagtggcacaatcactgttcactgcatcctcgaattcctgggctcaagcaatcctcctgcttcagcctcccgagtagctaggactacaggtgcacgccactgtgcctggctaatttttaaaattattttttgtagagatgggggtctcactgtgttgactaggctgttctcaaactcccagcctcaagctatctttctgcctcagcctttcaaaaatgctgggattagaggcatcagcctgggatcacacccagcttccaaggcctcttttataagggcactaatcccattcgtgagggatccaccctcatgacctagtcaccttccaaaggccctgcctcctgacaccatcatcttggggctaaggatttcaacatgtgaatttgagggagacacattcaaaccatagcaccttccaagaccactttctgtgttgtggaagaaaagatgtgtttttgttttgacatctgaacataaaacacatatacacagccacatgtgagaaagaagtacagttaaaaattccaactgtgaatttagacacacaacccaaaagaaaccaagagcctgccttcaggaattaggctgccttgactctgggcttcttcctcttctctttgactattcatggtgagattaaaatgtctgtccttgtgcagctgggcacaagggtacttgtttgtgacctccccaaaaaggtcacaaacaagtaattaatgtttcattcatccaggaatctatcctggggacttcaaggatgcacacatatttagaccacaaaattgttcatctgcatgtcattgaaaacagaactaggaaaaacctaggtgtctaacaataaggaatggttacatcagctacagtagagccgtgtagtaggatatgatgcagtcactcaaatcatgtggcagaagagtgcttataaccagaagttcacaataagcaaaggggagaagcaggttacaaacaatctgattctatctgtatcacataggaaatcatgaaaagaaaggattaggaaaatgtccaccagaatgttattaatgattacctctgggtaataaaattataagattttagtatatatgctgccaaaatgagtataaaattttagatgttttaggccagccgtggtggctcacatctgcaatcccagcactttggccgaggtgggtggatcacttgaggtcaggacctcgagaccagcctggccaacatggtgaaaccccgtctctactaaaaatacaaaaattagccaggcatggtgacatgttcctgtaatcccagctactcaggaggctgaggtgcgagaatcgcttgaacccaggaggcagaggttgcagcaagccaagatcacaccgctgcactcctgtctggaagatagagcgagactccgtctcaaaaataaataaaaataaaattatagatgttttaaattttgttctcttttttctgatgtatccatgcctgttagattttctaaaatgagcaggtatacttttacaacaagaggcagccttgctgtagaaattattttaaagcaacatttctgcctcttaaaaatgttatatgaaaagctgccttccccatatactctactcattgcttctgcaaatatttgaggaccaccatgccccaaacaccatcctaggcactggagctgtgccggggaacaaaacagacgagccgtgcgtgctcatcccagtggccgaagaaagtaacaaacaagtagagaaatacaggattggtaatgagaagagagggagggagtatgcaccacagaaaccggtgcagggacaatgtcagaaggagtagggagcctcggggctaaagcatcctttgagcagagatagaagggagtcccgtgcctatctgggtcagaggaagtgcccaactgcaaaggccctcaggcggcagcgtgcttggcgtgtcccagcagatgaagtattgagccagagaacagcggacattttatttactctaactgtgctacccaggaggctgtcatgcccattaagtagcatcattttaacctgttgccccgttaccgagtagaagataatagatatcatgacttggagcttattagaaatacacaggccatattccactaacgataccgtgaaaaccctcagttcctttgtggctttctgcttcgaaacacttgatctctcttaactaacgttgcagtgggtgcaggtaaaggcattaccttagaggtatgatgctgtgctgggcatccttggttatatatggcatggctatttctgttaaccatgccctgttacatggaatagcaatgaatcaccatcagtgttgttttgccagtgttgttcagattagctgtgaatacagaggactttcatcgttgtacaaaaaatggtaggagaaatccacaattattcatttgttcctatggttggtcatcgttggcctgtccgtggaatcttagaagtagaaagaagcttctgttgtcatctctccacacgttgcaactgtctttgataagtatattactcaaagccttattttcgagaatgctaagagatcatgtatttttgaagacatatttacaaaataggtgagaatgaacacatttaaagtggaatgtagttacgttactggaaagaagtcccaatccagaccccaagagagagttcttgaatttcatggaagaaagaatttggggcaagtccacagagtaaagtgaaagcaagtttactaagaaagtaaaggaataaaagaatgggccgggtgcagtggctcacacctgtaatcccagcactttgggaggccgaggcgggcggatcatgaggtcaggagatcgagaccatcctggctaacatggtgaaaccccgtctctactaaaaatacaaaaaaattagccaggcatggtggtgggcacctgtagtcccagctactcaggaggctgaggcaggagaatggcgtgtatccggaggtggagcttgcagtgagccgagatcgggccactgcactccagcctgggcaacagagcaagattccgtctcaaaaaaaaaaaaaaaaaagaatggctactccataggcagagcaacccccaagagctgctggttggctatttttatggttatttcttgatcatatgctttaaaaggtgtggattattcatgagttttctgggaaaggggcaggcaattcccagcactgaggggtccttccctttttagaccatacggggtaaccactggatgttaccatggcatttatagaccatcatggcactagtgggagtgtcttttagcatgctaatgtattataattagcatataatgagcagcaaggaagccagagggtcgctttcctcgccatcttgattttggcaggttttggctggcttcattactgcatcctgttttatcatgagggtctttatggtctgtaccttctgagaacagtcctgctgacctcttgttttatcctgtaactaagaatgcctgacctcccaggagtgcaaatgcagcccaacaggtctcagcctcattttacccagctgctattcaagatggagttgctctggtttgaacacctctcacaattagacattaaacagtacttcagaggctgcccaggagttctatgatgatgagatggacccaccgggagccctggagtaatggttcagattctgattcttaactgtagatgaatctttggacctgtattcatactggagataaatcagcaccccttgtaagaatttctggacagagggctattgtattagaggtcagaaatttctatttttatggtctgtctgattttccatatagtgtatattcattatataaaattcaaacatagcagagtgtctatggtattaagttaaaccctttgaaattgctgttaaggtgggttagactgtcacactgtcacagcttagcagctgcaaacttttaacctattagaaaatgaacgtctccagccatccagcccctcatagatatacaatgtaagtcatttgtcacaaccaccctcaattttaatttgaaaaaacccctaatagggagctgaatgtggagagcttctcacattacacatggatagcttcagacacagatgtttttacacatgtaccataacccccatgtaggcgaatttgggtttgcaatattcagattcattttgtatgatttgctttacagaatgccactgcaggagctctttgaattgttaatagcttcagtgattgcaaactattgtgacttttcaagaatgtatctgtggtataaagtgagacgtgtcagtcatcagtaaattttcaaatgaggagggaacactgcctggtctcacagcctggtcttccaagtggcatcacaatgccaaacttgaaccaaacgtgaatatgccattttttgaggaacctaaaaatcctggattctgggttgttgaatcatagccaataaactgtgaggtactttagtcccattttgaaaaaaagagcatgctacagcttctgcatttaatgtcacttcattctattcacaacattacatattgtagttcccatttttatttccttttaaaaatttgtgccattttattaagtcagggtcttttcctactgcagtcttaacccagaccccttagagggcttcagcaggctttccggaagtcagggtggatagctagagccaagacccattgcctctcctgccccccttaggagggtgtgggagcccacggggatgtgcctcaacctcacaacaggtcatgagctcctgcaaagcccatttgtagcctcacacatctctgcaggtcacaggtttctggtctgtgagttagcccacagaactctagcccaggcagcatgcagttgctcattgaatcccagaggccttcagtgtacagtcacggagcaggtgcatgccagaagcttgaaggaaagtgcagtctcctgcactttgtctcctttctgggtcaaagcaaagaagaccagagtaatgttgggtgcggtggcttctgcctgtaatcccaacactttgggaggctgaggcaggtggatcacttgaggtcaggagttcaagaccagcctggccaatgtggtaaaacccatctctactaaaaatacaaaaattagccaggcatggtggcatgcacctgtaatcccagctactcgggaggctgaggcaggagaatcgcttgaacccaggaggtggaggttgcagtgagccgagatcacaccactacactccagcctggtgaacagagtgagactccgtctcaaaaaacaaaaaaaaaaaaaggaagatgacgaccagggtggagggaataaagcatggggtgctacactagagtccttttgcaaaggataccttatttcaccttcagtgcagtccagagagagagcccagcatagtccagggacacagtcttcttactactatattacagataaggaaccgggggctcagagaggcagtgtcatttgtccagagtcacacagcaaaaatgggtaagattaagatttgatccgagctctttggaatccaagttcagggctctttccagagttgcccactggttttatataataattgaagactgtggacggtggaaagggtctcagagacgagtgaatttgacagggatgttggaacttggagaaatgtcccaactgtcttagatcagcatttctcaaccttaaatgtgcacaggacccacccaaagattttgtttaaaatgcatgtttggacttagtagatctgggatggggcccaagagtctgcatttctgccaagcctctagctgatgctgctggtcctaggaccagtgcccagctacttgggaagcttaggcaggagaatggtgtgaacccgggaggtggaggttgcagtgagccaagatcgcgccactgtactccagcctgggcgacagagcgagactccatctcaaaaaaaaaaaaagaactgaacagacatcatcagagctgaaaggagattcctcctggtgcaggggtggaggacagtttcacaggaggatggcagcactgagagccatgggggtctccagcctgtggactgctgctcagagcctggtcccccaccgctttctttacctaacttggaaatgagtgagatggactcaagatttgggacacatcagcaggagcgtttctaatgagttaatatctgcttgaggtcagcagcccagtgcatgctctgctctgagcattcattcatcttcaggggacattctgtgtttctgcatttcatcctctgcattcagaattttccatttgctcaggcccccagcagggcgtctggccacgttgggccgtgtttgtattgctggagtaaaggatgccagcacacttactcttctgcttcctcaggttttctgaaatctctgcagttaggctgttagcttcagctttatccctagacgtatattgattttatttgcactcctggtgaagtctgaattatagtcatgacaactagagttatgtcaacaatatgcaagccaggaagggcaggtctcttaattctgctgggaggccagttgccaaacaatacattaaaaagctcagagaaagaaaaatggtcagctcagggctcactgttgctcttgagccagagatcccagctggatcttgggcaagccagacttctcagcagaggaatagcccttcagagaaacccttccaagggcatggtttcagcttgctggcctggctaactagtctcgtgtggcctctggggagggtcatcatgtggccaaccaccctaaaggcagagagccctcccagcacttctctgtggctgtcccagcatgaacagtgattgcttgagagaaggagttcagattatgtatgaaggtgcaaatgcatggagttctgggctgcttgtctgcaccagctcacctgactatcagctgcctttttatgttagtttgtcatctggccaactagtgctggctacaagttggcctctgtcagttctgtcagtcttagtgcttaatgagcacaaatgtgaatgaatgagagagagaactctgagttttgaatgcatgtgcctgatatagtgcttggtctcaagatacaaacttgagtaagacttggtccttacctcctaggatctcacaggctagtgaggaagacagatcaataaatccaagaagaagaggctgggtgtggtggctcacacctataatcccagcactttgagaggctgaggtgggtggatcacttgagctcaggcgtttgagaccagcctgggcaacatggtaaaaccgcatgtctacaaaaaaaaaaaaattagctgggtgtggtgatgtatgcttgtagtcccagctactcaggaggctgagatgggcggatcacttgaggtcaggaggttgaggttgcagtgaaccatgatcatgccactgcactccagcctgggcgacagagtgagaccctgtctagaaaaaaaaaaaaaaattccaagaaggaatgtgtgttaagttccccagaagctgacgtagccccatggttttgagaagttcattcctgaagggatcccaggagacatgggtggggagtagagatgggagccaggtaagggtaggacctagccaaggttgtgttctcaagctgatgaccactgtgggcagctggagctcggtcttcttgtgagctggaagaacattctggaacaggcttcctgttcccataactcgggcacctcgggctccctctgcaggagtggtctgaatggaaccctcaggtgttcgcaggtgtgcaggacagaaagctcaggtgtttgcaggtgtgcaggacagaaagctcaggtgttcgcaggtgtgcaggacagaaagctcaggtgttcgcaggtgtgcaggacagaaagcgcaggtgttcgcaggtgtgcaggacagaaagctcaggtgttcgcaggtgtgcaggacagaaagctcaggggatacgggtggggccctgtctgctgcaggttggaaattccagagaaaccaaaaggaggcacttgagttggactttgaaggtgaacagaacagcaagacccctgccctcccagacttgcagtcaggtggcaacggtttccgggaagaaagctaactgggagaaggaaggagtgttggggtttcaggaagaccactgtggaggatgactgtgaacagcagaagagggaagggcggagctggcgtcccaaggcaggagacaggtgggagcttgcggcaggctggcatggctgggaccgaggcggagggagtggtgggaaataagccgagagacagagcagagcgagtgtcctcctcagccatcaaagcactcagccttctctctgtcgtgtgggaagccggtgaatccaggacaggaccactgtcttttttttttttttcgagacagggtctcactctatcacccaggccagagggcagtggcacgatcttggctcactgcaaccttcgcctcctgggtttaagcgattctcccacctcagcctcccaagtagctgggactacaggcgcccaccaccacgttggctaatttttgtattttttggtagagacggggtttcaccatgttggcaggctggtcttgaactgctgacctcaggtgatcctcctgccttggtgtcccaaagtgctgggattacaggcttgagccaccgtgcctggcttctgctgtcattttagcagtagcccgccagcgagagcaacgggacatctttggggaggggttttgctgcccgtgggctaggggaggtccccaaacgctggtgggacctcgacctcagctggtgtccaggctcttgatactgccacgggaaggaattcaaggatgagtcagaaaatagtgaaaaatatggagatttattgcaaagtgaccagtacacacttgagaaagggaaaggcaggcatactccagagagagtggcgtgcaagggggtttggggcctgctacctttatgggcttctttaaggggtgggatattcctgaagattcccagaaaaaggtggagatttctcagaaatgtggtgccacctgtttttacactaaatattggtgttcctggaacggccgtggcactggtgggtagaggattgaggatgttaatgagtggacagtgaggtcccaggtgaaactgggtcaaatccagcaccatgttgggtccagttggtcttagccagcttggcccacatcctgatgtttagggtcttgtgggcccctagcttatgcagttatttcaacatttttttttcttttttgctagtcccgtgaaactgctgcctggaattttctgttctcctgctaccaccttgtattattcctgtttgagttttcttgaagaaatagcagttgagctgggacctgaagaagtgggagaggtcagccaggctagggatgggggagaaacggcaggccagggaaggctgggtcttcaggaagacagaggaggtgctggccaaaggtctggaggtcaagcctcgcgctgcatctgatcttgccctggcgccctgcccacctggaagtcctatatggttcctcgtccccctgccctcaggcatcccccacccccagtgatgtagctgctcggatatccactggctgtctccctcaaccccagcattgattagacccagactgaaagtgggacttgctcaaagccggcccagacccctgaggttgccgtaccgtggagtttcctaccataacagagctgctttcaaaaactcagcattggatggctctgtgtcctttggcagcaaggcctgcaggtggcagcgtggagatggctcagggagtgtgttctgtagtggaaacagaagtgctgctcttgattgggggagcaagggcgtgaagatgctgggtctgctctgatctcagggctggcttgggctggggagaaatctattctgaccctctgggccaggccactgagaagctacctctctgatatggacgtggtcagcctgccctggaccccacacaccggtctgtctccttcccaaacagctgcctgttctaccagcctccagaaactcagctctgcttccggctgaaaagaatctgcccaggcagagcaggaagcgtgtggcgtcctctgcccagctccaccttgtgcgagcaggtgtctcctttgtggatattgctctcaaacctggtgattgatttgagacctgaggccaaggtcatattgcaaataagttcagaagtacttgaatgtaaaaatgcttctgtcagcctttagcctgactgtgagcagtgtctcatgcttataaccagactaatatgataacatgaaactcacaaggccgtcgttaggttatgtctgcagttgaggcggtagatggcaaagtgtgtaaaaaggccccctgcctatctggaggctcatcactgcatcagcccacatcccctgactgtggtggtgacttgtcaaaggaggaaggcggaatgactgtctgggaatgtcagaggagtccagcatagctgggtagaactgcgtgctacagttggaaactgggcattcgttggtagtatgaaccgcaacttcacccaggtgaaagtagtttttaactgtttcaagcatctcagatcagcaagtcagttgtgtttgggtgttttcagatgttattgtgaatcctgagaaaatacgattaatctgtgcctctttctggtaacttttttcttattctaagtcagaagtgcagagcagggtggcatagtcggtattctcatctcaaatttgcacttcctatgtattcttttaaatttagacacaaccaattgggtgcggtggctcacacctgtaataccagcactttgggaggccgaggcagatggatcaggagttcgagaccaacctggccaacacagcgaaaccccatatctactaaaaataaaaaaaaattagcttggtttggtggtgtgcacgtgtaatcccagctactcaggaggctgaggcaggagaatcgcttgaacccaggaggcagaggttgcagtgagctgggatcgcaccactgcactccagcctgggtgacaagagtgaaactctgtctcaaaaaaataaaaattaaaaattaaatgtagacacagcctaggaagtttctcaacttagaatcattgccggggccagtttttagaggactgggctggccctgccgaagtgggcaggccagtatgtgtagcatcacagttcatgttttatctttatgggccttctacgtttccagtggccccaaattcacaggtgtttccactacatgctgccaacaaaggcagagctcagccgtgtttcacactttcagtctggaagcaaaaatatcagggccatctctccctcatgttttaatgtctctggtcaaatgggggcactcaactcatcagagcatgttcacaagccctgagacttgatccctgtatgagcgagttattctttttttttttttttttttttctgagacagagtctcactctatagcccaggctggagtgcagtggcacaatctcacccactgctgcctccgcctccccagtcccagttcaagcaattctcctgcttcagcctcctgagtagctgggattataggcatgtgccaccatgcccagctaatttttgtatttttttagtagaaacagggtttcaccatgttggccaggctcgtcttgaattcctgacctggtgatccacccacctcaccctcccaaagtgctgggattacaggtgtgaaccaccatgtctggccacaagcaagttattgttatcggagaaaagcatcacccaacagcacagcatctgataagcacatttgggcttcagttctgtatttgttcagccagagagctgagtgcatgtcctgtgccaagcactgttagagttgggaatctagacacagctggcagtgtcacagggtgaaccccaaaattggggttcagcctaagaggccacatgggttcttggctttgggcgggagggaattcaagagcaaacctacagagtaaagtgaaagcaagtttattaagaaagtaaaggaataagagggtggctactccataggcagagcagccctgcaggctgctgattggctattttggtggttatttcttgatcaaatgctaaacgaggggtggattattcatgagttttctgggaaaggggcagggaattcctggaactgaggattcccctttcacaccatgtagggtaacttccacatattgccatgacatttgtaaactgtcttggtgctggcgggagtttcctatagcatgccaatgtattataattagcatacgatgagcagccaggagacctgagactgctttcattgccttgttgattttggcgggttttggctggctttgccacagactgttgtattaggggttctttgtgacctgtatcttgtgaaaccagtcctgctgaattcctgtatcagcaggggctcctcctgcaaatgcagaggctccccaagagagcacaagggggctcaatcagtacttgtgggatgaaggcatggtggtgctccaagagggacgacggatgattcctcggaagccttctctgctgctgatccatagtaaagccccttgagtgccttccttatctccttcaccatcatcttggtaaccaccaaggtgttgactggagtgagttcctggaaagagctccagagctaaggtctgctgcactagggagggaggtgcaccctctcattaagaatgggcaggcgtggtggctcatgcctgtaatcccagcactttgggaggccgaggtgggcggatcacctgaggtcaggagttcgagaccaggctgcccaacatggcgaaaccccatctctactaaacatacaaaaaaattagccatgcatggtggcgaatcccagctactcaagaggctgaggcaggagaatcgcttgaacctgggaggcggaggttgcagtgagctgagatcgcgccactgcactgcgcttcagcctgggcaacaagagcaaaactccgtctcagaaaaaaaaaaaaaaaaaaagaatgtatccaaggcaagaatcattgccctagggctcagggatgtggctgtggaggtctagccagggaccagggtcctggacctgtcagcagctgacgcttcttacaactagctccttcccgtcaggcagatgttcaaaattcggagtcttgtgctgggagactcagcccactccaggcttctccagggctccttcggtgacagtgagacttcccgtgggtttactgaccttcctttttctgctgagcccttttaccttttgcctttgacatggactctgaggccctggtgagagtcgtgagggcagggccccctctagagcttctaaaaactcctctggtagctcgcccaccaggcagtgaccagatattcttcaggcgcaaagggcgccttgtgctccctttctttttttttttttttttttttttttttgagacagagtcttgctctgtcgccaggctggagtgcaatggcgcgatctcagctcactgcaacctccgccccccgccccccggttcaagcgattctcctgcctcagcctcccacgtagctgggattacaggcacgcaccaccatgcccagctgatttttgtatttttggtagagacggggtttcaccatgttggccaggctggtctcaaactccagacctcaggtgatccacccgcctcggcctcccagagtgctgggatctcttcttatgcacatcaccatgtctttttgtgagttcaactcttgatttaaaagaaaaaaaaaatcaaaaaaaaaaaaacaacccaacccctgttcttactgtgcatttgaaaatagcgatgaatcatcccaatggctttgccattttaagcagttcctctccagagaacattttcctcccttttggtgtgggtacaagttttcctttatgcagattaattttaaattggaaaatctacaaatacaaaaagcatcagtacacagtttatttcctttattatgttcatggacccgaagcactgtttttcccaagaagtcgactttgacatactggaattacaaccaaccagcccttcacggatccccacgcatcaattctaggttgactgtgtaaagagttgtctcttaatagggagagcagttttctgctaccttgctgactttccctgtagggtgagtgtagctgctgatatctgaacaggtactcaattctcaccctttgttccttttctcaccccatcccacctccaagcaaacattaaactcagttacaacacggtggtttctgtcactctttccccagaaaaatgacccacgtgtttcccatttgtgcttgttatttagaaagccaaacttggccctgctggcaacaaagtcatcagtccctctgaagacaggaaacaaccttccaacaaccttgaccgagtgaaactcacggacttcaatttcctcatggtgttgggaaaggggagttttggaaaggtaagaggacagtcgtctgcaaattgcaggggcttctgcagagaatgtcgaatcagttttgttctcctcgtagtttgcagaatagcacattagatttccctgtgattcaaggtcaggagatcaagaccatcctggctaacacggtgaagccccatctctactaaaaatacaaaaaattagctgggcatggtggtgggcgcctgtagtcccagctacttgggaggctgaggcaggagaatggcgtgaacctgggaggcggagcttacagtgagccgagatcgcaccactgcactccagcctgggagacagtgagactccgtctcaaaaaaaaaaaaaaaaaagatttccctgtgatttgtacagtcatccagaagaccaccaggatggctaaatggtagaaaggagaggtttattggtggtatcagtttgcaaacccataaaagaaagtctatggtgtgaaatgaaggtgccctctctttgaggagagaaagggcaggttgggttttatgcctcacagggtccatgttacacagtagagtcatccatattcaacaggtttggggggaaagcttgacttatctgtgagggaagcctagcacaggcacaatggatgaacatatatgtaacatgcatcttatgttcactttggggtggggacttagcattaaaatgaggtggaatttgcctaggcatggtggctcatgcctgtaatcccagtactttgggaggccaaggcaggtggaccacttgaggtcaggagtttgagaccagcctggcaaaaatggtgaaaccccatctctactaaaaatacaaaaattagctgggtgtggtggtgtgcacctgtgatcccagctactcgggaagctgaggcaggagaatcgctggaacctgggaggtggaggttgcagtaagccaagatcatgccactgcactccagcctgggcaacagagggagactccgtctcaaaaaaagtaaataaataaaaaaaggtggaagttggctctttagatcaaaaggtgaaccacaggacccaaaaacagtttgtgtgcaggctctgcaagctgctgaaactggcttcaggtctgcagttgcatcacagaaaagaatgtttgtaaggccagttctctgtccagtccaagtcatagtgatctgagttgtcaatcaaagttaggaggggcctgatagctcctactgctagggagtttagcgagagtggtttatcttgtagctgtagggatttagaaatttgccatgccagctgggccctgaaccctcaacccatagataactatttccttaactttaatgttaccagaaaggggtcctgatccagaccccaagaggagggttcttggacctcaagcaagaaagaattcagagcgagtccacagaataaagtgaaagtcagtttgttagagaagtaaagaaatgaaagaacagctactccataggcagagcagcagcatgggctgcttgactgagtatacttagaggtatttcttgatcgtatgctaaacaagggttttattattcatgagttttctgggaaaggggtgggcaattcccagaactgaggcttcctccatcttttagactatataaggtaacttctgggcattgccatggcatttgtaaactgttggggtgctggtgggagtgtcttttcacatgctaataatgcatataatgagcaatgagggtagccagaggttattctcatcgccatcttggatttggtgcgttttggctggcttctttactgtatcctgttttatcagcagggtctttctgacctgtgtcttgtgatactagccctgctgacctcctatctcatcctgcgactaagaatgcctgacctcctgggaatgcggcccagcagatctcagccttatttttcccatcccttattcaagatggagtcactctggttcaaatgcctgtgacattagggtccatcttagtcgctaaagaggcatttatttggtctctcagatcagagtgcacagtcctcacctggtttctacttccttaaaagcaactgcatccaaaaagctatagtgggttcactgtgttgttactatttctcagtgttcagaacagaagggatgctcagaaatgctggttgatgaatagttttcacaactaaaaattaaatgttcacttgtagtaagcaaatacaatcattaagagatactgacatggggtcttcagcaatttgcctgtatctccattcggtttctgtggccccacatttcatagacccaggaactgatttcaagtctaggttcttgacttgagagattataaatgtcagtcagctttcactctaaggatactcctgaaaaatgtgcattattccagactaatcctgatagagaatgttgagtattcattttagcagccaaaatagtgccattatgtggcagtggcctataccatttacaaatcttggcagcattgaagttttgcaaatgctggagggactgaatttgtagtgatgtgtagaatttacaaatttgcacataaagtttaatatttttatgttccacattgacaaaggtgcacaaactgtcactgagccgtcacctggcctggttccttccctctgccccccaagatatgtgcttacaagtgttcaggttgttcttgacgtgttctcaggtgatgcttgccgacaggaagggcacagaagaactgtatgcaatcaaaatcctgaagaaggatgtggtgattcaggatgatgacgtggagtgcaccatggtagaaaagcgagtcttggccctgcttgacaaacccccgttcttgacgcagctgcactcctgcttccagacagtggtaaggaccctgggaatccctgcgatgcagtacccagctctcagagctacgcctcagcccaaagcttcttagcatccttgttcctttggagaaggctggagaaaggtgtgttgtgatgtcaagcagaggtgactggggaccacctcccacctctctcactggtagatttggggcatgccttctctgtgatgtcctctgcttggcattcatgccatttaattcggcaaacatttctttttctttttctttctttctttcttttttttttttttttttgagacaggatctcactctctcgcccaggctagagtgcagtggcacagtcacggcccactgcagtctcaagtagttgagaccacagatgtaccccaccacactcagctaatttttgtatttttagtagagacgggggtttcaccatgtttcccaggctggtcttaaactcctgagctcaaacgatccccctacgttggcctcctaaagtgctgggactacaggtgtgagccactgtgcctggccttaattcagcaaacatttccatgaaaggttttcttcatgcctggtactgtgctcagactttgggatacaaaaacaaacaaacaaaaaaactcacagtcttggctttttttttttgagacggagtcactctctcttccccaggctggagtgcaatggtgcgatctctgctcaatgcaacctccacctcccaggctcaagggattctcctgcctcagcctctcgagtagctgggattacaggccgctgccaccacgcccggctaatttttgtatttttagtagagatggggtttcaccatgttggccaggccggtcttgaacttctgacctcaggtgatccacccgcctcggcctcccaaagtgctgggattacaggcatgagccaccgcacctggccacagtcttggctttttaagaccactggttccactgccaaacatggcattggagcataaggagacttgattttgtaaaagagcatgttcttgttcaatgccacacaacagggactggcaaactgtggcctattctctatggcttgtgagtttaggaaaggtcacaacaaggaaatccaaagagtcatatatcgtgacacgtgaaaattaggtcaaattttaaatttcagcatccataaacagctgttttgggacatcaccacactccttcgtgtacctgtcatctacagctgcttttgcaccatgaaggcagagttgagttgctgcaagagacactcacagcctaaaatattaatacatactgtctggccctttgtggaaaaagtttgctgagctctgtcgtaaagtaaaactaaacagaggacaaaaaaggacattccaaagcactaatcagtccgttgcagggcttgcaagtggcctacaagaaacagacatggccgggcgcggtggctcacgcctgtaatcccagcactgtgggaggccaaggcgggcagatcacgagatcaggagatcgagaccatcctggctaacacggtgaaaccccgtctctactaaatatacaaaaaaaaaaaaaaaaattagccgggcgtggtggcgggcgcctgtagtcccagctactcgggaggctgaggcaggagaatggcgtgaacccgggaggtggagcttgcagtgagccgagatggcgccactgcactccagcctgggcaacagagcaagactctgtcttaaaaagaaaaaaaagaaacatagatgtttagatgccaccatagtgagacgttgccaaagctggtctttccactcctcagaggctgcccatttaaaatatgactccataatcagtagctgtaattgatgcgattattactattttcaactgcccattgatcagagattgactttctgtcttatgcctctttgaaaactcttgggaggaacctctcagtgcttttgtgttttagaatctcaaaatggctttgcagccacccggagcctctgggtgtgtagcagtggccgcggagtcaggcgccggccactacgtgtcagcctagcgctggcggcacgttgagcttcctgctcccagccgttcccactgactctgaatcaagtcacgccagggagagatgagagcagcatgctcggaagagacaaccacagctctgaatcccagcccagagcctgtaaccctggttaccctgattaagctctggaaagctacaaaacaaagaaatgaagatgaaattaaagttcataacaggaaagctagagactggggctcccagggttgcttcctggctattagcaccagcttcatcatttttttctccctgtgcagcactttaatgtttaatatcctctgtgaaatggggatgttttctagcagagagcagaggtcattatttcactgttaaacccctccatcttcctatctgtcccagcataatgtcctcaggaatatgcagatttatttgggtctatgatacatgcccatcatggggccaacacttagcctaccagtgacagagaaaatagaaaaacagtgtttgggcatattacagatgcaaaagaacatttgattagcatctccatctagagtcccctgtcccatgtccagtaaatatattgagcatgtgtaatcctaagcctgagagatgtgttttcaggagtatccatttaaacacgatactacattagtatggcacgcctcccagacactgcaaaccagcctttaaacatttggaccatggagaagcactagttaaaatgaaataattgccttatgtggattcctcacaccatcccttacttagaaatttattatatgtataggaagatagggaagaatgttcaaggccgttactataatagcatatgtaacaggaaggcacgttgatggagagccattatttcagggttatgtaatgactttatacttcccaaggccctcatgcagtagggtttattacttattctttctttggaaaaaaatgtgaaagagctctaaactgagcacatctgcccatgcagtccccatttaactaatgagaaagcaaaacacaacctgtgaagagcaaaggaagccacttggctggggaggagccctgctcatgtgttgaaccttggtctgcaggatcggctgtacttcgtcatggaatatgtcaacggtggggacctcatgtaccacattcagcaagtaggaaaatttaaggaaccacaagcagtgtgagtattattttttaagtcctttaatttgaacaaccaagtcctaccaactggaaacttcctttttttcccccccgcttgagattgggggtctcactctgtcactcaggctttgcctcccaggctcgggtgattctcccacctcagcctcctgagtagctgggactacaggcacacaccaccatgcctggctaattttctgtttttggtagagatggggtttcaccatcttgcccaggctggtcccgaactcctgagctcaagctgtctgcccacctcggcctcccaaagtgcggggattacaggcgtgagtgagccaccatgcccagccccaactgggaacttctgctgggtgaaatgggaaagtgggattctgcccagttttaggttgaatgttataaacctaaacatgggaggcggagggcagatatactggtaggatccatctaagatggttcctaaggagcagtttattctatttccagtatttccaataaactggagatgttgccatatcccatcatcacccaggtccacccttgttgatggagttattcttatctgttgaacaaatggttatcacacacctgctctgcaccaggcactggggttgcgaaaggaacgaggtgctccctttccagagggagtttacactccaccctggaggtggagaagtcacctaacaattaatagtgcgttgctgtaactttagagacttgcgcaggataccaggataacacgtaagcccctaaaaatcggggagagggaagtgcaaccccacgaaatgaccggctcagaggtgggggaagagccttccaggaagagatgtgaacagaggcagaagcaagtccagggaagcagccttgcagctcagcaggtgtgggagatgctgtgagattatttgaggggcgggggaaggggggaacgtggtaggtggggctctgggtgaagagcctggtaaggagcctggctgtggaggagggaagagggaaggcactgcagtggggcttgcaccatcagattcagtttttgcagagctctctgggggaagaaggaagcatgaaaggaaatggtagaggctggtgcaggcgctggtgagaccctttatagataagaaggaatggagctgtagttagggctagaccttggagccaaagaggaataagtgtctttgaaaaacaccctggaggaagaaaagcagaacttattgactatggaggagagaagagataaacctcttccagtgagaccccatttcaggcttgggtcggggcagccaccaaggaggaggtggtttgagggggagattcatgagctcagttaagaacgttttattggaacgcacctgcatgatgggatgcgggagtcggcagcacaggaggaagacgtgggctccaggtgaagatgagagattcatctgaggggtgtggggagctggaactttggtgctggaaaacatcatctcacctctcaggggccaggaagtctcaggaaacaccagtggagcaagcctaaacaaagggcgagtttagttccgcagtgaggaaacctcgggggcatgtaccctgatgaatgaagtcagcacctgttaataggattctggctgctgtgccatctaagagacacattggaagaatttttggcctgcgagggattatgcaccctagggaagattaactgaaggcagaatagggaaatctttggttgcaagctttaaaagtgtgaagggggatttttctgcctttattgattgttccttttcagttttcagaaatgcctgtccttttcttctgtcttatgttgtagttataaagccttaaaatactcagattgtaaaataaagcttggtcacacaggactgtaaagagcagatagcagagtcaccctatgttataaagtaacataaaggtgtctggtccaatatcctttcattatattatttgtgttgcagaaaagtttagaaaagcatgaaaaataatgtaaagatcacctgtagtaatcccatctcttcaccctccccctttctgtactcttctagccttcagaggtggcccctcgttaagggtttggtcttgatcattagagattttttttcctctctgctcgtgtagacacgtgtgcttattttgagcctcctgcatgtgatatttccacaggcacagtcttgtggcttcttcgacttcaaagactcctgaatgctatgcagatttttaaatattcgcctccttttaatctgagtttcagctattaatgtattaacaattttgaagtgatggtagttactgctttttattatgaattatttaaaagagtaaactcagatatgaatctctccaacactcgcaaggaatgaaaacactagctaaagagttcatcacccactatactttgccttccagggagtaattgtattgtattttcaaacaccagtgtattctgccagtgaataggaaaatggaaattttctttacgccatactcctgatatagaatagtctaactggtatccactctttaaatgattgtatgagaaattactctgcaggcaataagctacttgtccaccttccccataagagaataagaagccggtttcattggttttattagctgtctcattcacggataagctggaggacgaagtgatggagggaggaccgggggttggaagaacacgatgctggtctctgagagcctctgggtctgacattcttttctctctttgatgcttgaatttgagaatgtaaagtatacaggcatctaaggaagcaagtgagaaacctgaagcccgttttcttttgcagattctatgcggcagagatttccatcggattgttctttcttcataaaagaggaatcatttataggtgtgtattgaagccctcctaccagcagctcagcagagaggttagctgggcctctgtgggcatgtcattctggaatggtgacttaagacacagagttgataactccccaggaggaacagagacctgctgggacccaccttcctcctcaccctggaggcaaatcagagccaccttctgatttctagaccgcaaagactttatatcttgtttctactttttccacaagaaaacacatttttctctccattgacagctccttccactgccttttctttggaatggaggtcagggagcaatggaaactgaattcctgttatagatgttcagcagaagaagaacacagggaactggggagaggcaaggaaaaaaatctattgaattaaattctgcctgttagtagctgtgctgaaagtctggtgccaaagaaggaagaatttcttccagtattaattgaagcataattagaaggatatatggcacaggcagaatggaagggacatgtgtatgacccagtgaagtggttctaaacccgtgattttgcaaacctggtcatgtgtcagaccccctgtgtgggacatgaataaatcaaatgattgagactttcccagacgtgctcaattggaatctctagagtcacagacataggcaagattgagaatcactagtccagtcgtttagtaatccattcagtatgcatttaagcacctgctgtagcctaggcacaatattagtctctgaagatatcaacacacattgacttctgatactacagtccagggacttatagttaatattgccattgagctgacaggtattcagatatccttctatttcaccagttccaaagcaaaccatgttatgtcatgggaaggactctgatgttaacccggttccttgcagggatctgaagttagataacgtcatgttggattcagaaggacatatcaaaattgctgactttgggatgtgcaaggaacacatgatggatggagtcacgaccaggaccttctgtgggactccagattatatcgccccagaggtaggaaccccagtgatcgttttctcaaccaggactcccaaactgtaaacgcagccctctcatgggttatagggtcactggcgaatcatgaagtcagtgcatggtcacaaccactaaatggactaaactggacaaaacagactaaaatagaggaaataggagagcccattgcacatagtaaggttgtgtcttgcttcctggaactgttgtttgctccatgtgagccagttgcttgggaaaatgtatttgttacatggtcatggtcaaaatcatttaagaaacactgttggctgggcgcggtggctcacgcctgtaatcccagcactttgggagcccgaggtgggtggatcataaggtcaggagttcaagaccagcctggccaacgtggtgaaaccccatctctactaaaaatacaaaaagccagggatggtggtgcacacctgtaatacctagctactcaggaggctgaggcaggagaatctcttgaacccaggaggcagaggttgcagtgagctgagatcatgccattgcactccagcctgggtgacagcaagactctgtccccccaaaaaaagaaatactgttgagtggagggaattacttgtgaaaatactctgcctggaaggcggggtgagacgggggttgcagtgatggtgtattagcagcatcgcggtgatgactgttctaaactgcatgttgtctggtctaggaagaatgtgtcagtgtggttctaagcaaaatggttccaggacttgtatcttgacagcagcggctgtgctgctctgcttttgttataacacttacagaggattttttttcctgttttatgaaacatcccacatgccaatgatagaatgggttgtcactgtagtcactgtagagccaactttccatccacacacagtcctatggatgccacagttttttcccatctgtacccagcatggtggagaccaatggatccaaagctgagctggcttcagctcttcacagagccctcagatgagctgttggcagccggtctcacatttattcaacagattaccccatgcatttatctcagagacagtagggatagtgaaaaaggcacccacaagctcagaagtcagacccatgtgagcttcaatctggaatctgttatttacagactgtgggaactcgggtgagttacttaacgtctctgaaccccgtttcttcagcggcaccttagggataatatcctccttgtagaattgctgtgtggactgaagtgcctaatacaacattttgcatctagtagaccctccatagtcattattccaaaagggaagctgctttttattcctttgtgaagaccttgtagttttatgatatttcaagacagcgtggacacatagacttcatttagaaacttaaattctgaatcgcatggccagaggtgatatgtgatcttgctgcataacttactgggattttcccccaaaagaactccctcattagtacctacagacatgaggtgaaattaaatagtcttatttttcaaatatgaggaatagtcagggtactgtcagaaatacaatctcttgatgtagtatttattctgaagcctgttactaaatgacaggtattaagcaggctgtgattatgagccattcagccttcattgaacaattcagcagatgatgtaaaagcttagtgatggggaatggcagcttttttaggaataaaggtggcattgaacctcatctctattaagaccaggtctctcctgttccgacaaatagctccttgtgttcagtaacacctcagctatctaataacaccaggaacaacagtgtccagtagagacaaaattttccatatcattaaggtttgtccatttgagtgtcttgtctttttttgttgttgcggttcggtatcattcacggtatgagttcctgttgccactgtaacagataaccacaaactcagcagtttaaaataactcagatttattatcatgtggttccggagatcagaagtccaaaatcagcctcactggactaaagtcaagctgtgggcagggctggtttcttctggaagctttaggggagaacctgttgccatccatgccttttccaacatcaagaggccaccacctgcattccttggttcgtggtgtcttcttccctcccccatgcaacgtagcatcttccaatctctctgtcttttccaactacaaccctccagcctccctcttctcctacaaggatctttgggattatatggggcccacttggataatccaggatcatctccctagctcaagatccttaatttgcctctgcaaaatcctttttaatgcataaaggtaatagattcacaggttccagggataaggatgtggacatctgttggggagaggggacttagtctatcacacttgttatatgttggagaacctcctcactgtcctcaacagggacacctaaacacacttctgtcatgtcttggtaacttcgggcctcttcatacacagagaatactctgttcttgctctagatactttcacatctgaagccttcattcccctccttacatctactgtacaagcaataatagaggaagtgaccaccttctattgtctaccgtgtgccaggcacatgataaactttctcttggctgggcacagtggctcactcctacaatcccagtgctttgggaggccaaggcaggtggatcaattgaggtggaagttcaagaccagcctggccaacatagtgaaaccccatctctactaaaaaatacaaaaattagccgggtgtggtggcaggtgcctgtaatcccagctgctcaggatgctgaggcaggagaatcgcttgaacctgggaggcagagattgcagtgagctaagatcgtgccactgcactccagcctgggcaacggagtgagacaccgtctcaaaaataaataaataaataaatacaataaaccttctctcatttaatcctcatgacaagccccacagggaggtagcatcagatctgtgtttcagatgaagtgacagaggtggttagtaacgtgtctaaggccacgttactgagaaatgccagaattaggctttgatcccaagcccaggtcacctccaaacctttgcactgctcactacactaaactgctcgaaacttgagcgactcacgtatccagacagcactctgcgtgcttactgtgcttaagcatggtgccacgagggatacaaaaagacatcagatggcccttgccctccaagtgctttcagtttataagaagtgacatcatactgaccagcaggaatgaaaatctatatgtggattccagtcagctttcgttgaaaacatcaggcaccactgctttggaaaatcaccttaaggttgtttcaccttttttgttgccttgctttttttttttttttttttttttttttgagacagagcctcactctgttgcccaggctggagtgccacagctcactgcagcctcaacttcctgggctcaggggatcctcctgcctcagtccataggttgctggtagtacaggtgtgtgccaccacctgtgcctagcctgttccagcttttgctagcattttttcctcataagtgttcagtaatttggcatatttggccacacgaatacttacagtatagagaaagatcagataggttcaaggtttcaaaatgtgtggaaaggttaaaataatatttcgtgtggaaaattcaaaatgtgtggaaaggttaaaatagtatttgtcctctgtgcaaatactcctgtcaggcagagacaaaatcattatcttgcatggcattctccttaataggcaaagcggaggcttaagtatttatggctatttgttcaaaaaccttgaaatcgattaataccttagcgtctccttagccagcgaagccgagctgaggcaaaaaatgtcactaacagatgagagtttgaagttgaaatggacacccacagaaggagcactcatcagaaaatgattcctaaagctgacacagagggtcctctttgctttgacatagaaagaattcttcaaggtcaatgagagtccttgagcaggccaagcaaaggcttcatttggatttaatccatctctgaaacttagttattctgggcgtgtgtgatccagtcacaagtcaagtagattccagcagccaagaatcaggctccagacactagcattgcgcactcttgcctggaagaaagagaagcaggaagagtgtctgcttctggcctgtgtcccgagaaccccctactgcagtgagagcaaagcttttcattttatttattttatataattttgttctaagaactttatttttttaaagacagagtttcgctctgtcgtccaggctggagtgcagtagcaatcatagctccatgcagtctcaatctcctgggctcaagtgatccttccacctcaacctcttgggtaactgggactacaggcatgtgccaccacgcctgctaattttaaaaaaattttgtagggatgggggtctcgctgtgttgcccagactggactcaatttcctgggctcaggcagtcctcctgccttggcctcccaaagcactagaattacaggcctgagccactgtgcccggccctgaagtgaagctttttcaagtgtgccatgtagagtcttcctcacagcatcgctatggcgggggctacgttagaccacacacaaaggacatcacccgtgatacactgacttctctgcaccaacctccctgagcacttctgacttgccacatgttagtatgagtagaagttcagtgacttgcccaaggtcacatagctggtaagagcaaaggtgggatttggatccgagatgttctgaccggagcccgtacgttctttttacctattgcattgtctccatagatatgggagaaaaagcaggtgaaagtgagcactcagtttgggccacgttttcttggccactcacttatctcaacgtgaatcagggacctgagtcatgatcagagatgcagtgaatgacgcagaattgcattccagctgttatccccagggagatcccttagaaaccaagggtgatccagccacacgcaagcccctccccagcacgtgggcatcgatctgttggcatattcagggtgccccccgagtgctgggcactgttccaggccggggggtgccgggccagaaagaggagcccagaggagagctgggaggagggccttggggctggaggcagctggaaatcagtgactgcagcccaggaggactgtggattttgagaggtggacagggcagtattctcagcagtaacagatggtgcatccaacacggttgaaatttccagggaagaagcttgcagacgtggttgcctgacctgcagccagctgcctatcagcagatgggcatactcctgggaggactgggggcttcatgggtccagagagctgaagagccattctggggtcacagcttctgcgttcccgccctacaggaatgccagcccactgatgcctgggacagcagccagattcctgtatttttatgtaaaatacacctaattgttccaagttggccctaacatatgttttttaacatgtgtatacaagtgaaattcagccaatgggctatcacctatgacctgtcttcttgaggtcaagagtcctattaatatttggggggagcatattaaagatgggaggaataaagaccaaaggatgtccatagaggtggaagcactagacagccgtctcgttcttggaccccaaggagggcaaatgttcatgaagtcagggtggccagggactgaggaggtccagcagacgggagtgggatgggcagaagatctagccactgggacttgatgatccctgagagagcagtgttggtaatgatgccgggatggggtgagcgtgagcatcagcagcgcagcaggaggaccttcctttgaggacatctatggtaaatggaaggaaagaaagtggacagtcactcccaggaaggcaggctgaaggaagcatcatttacgtggcagaaacttgagccaaagtttctaagccaaaggggaaatgccggagagagagagggagggcgggaaggagggagggagaaagaaggaatggggcacccgtggtaaggatgcccttccctctcagcttcaggaggaaggggaggggcacacaggagacctcacggtggcaggaaagctgaaaccccctccctggccagtctgcatcttcagagggtgacaccaggacgggcgggtattaggtatcttggctctgaattggaaccccctccctggccagtctgcatcttcagagggtgacaccaggacaggcgggtattaggtatcttggctctgaattggaaccccctccctggccagtctgcatcttcagagggtgacaccaggacgggcgggtattaggtatcttggctctgaattgggtatcttggagaagccaaagccttcacaggggccccaagaccctttagcacctgcctccccgccccattccctccctgacctcctccccctgccctccacccctccggagctctctagacccattgcactagctccctttccactctccaatttgccagacctctccatcctcaggccagttcctcttctttttccttccacccagcatgtcccaccccaggcatctgctcagagatcaccttggggaggccccctgccctggtgaccctatttgaacctgcaaacctccagtcccatccaggactgctgactcctgtccctgctgtttttcatggcactcatcccccttggagggacaaagatgtactcctgaactgatttttcagtctatctcaccaagctccaccacgggcagaatttcatctggtgttggctgctgtgcccctaccccagggtctggagccgtgcctggcactcagtgtgtacttggcatgggtgcctgcacgctgcgctcctggatgtggccacctaggaatctgcaggggagacaccgcaggaggacagagatgaagccttggagactgagaggggtggaactctttagccaggtgattggaagggtgacttccaaggccatcacaggtgttgggctgatggtatgtgacagtgcagagaagggccacaccacctcatgtcatcggctgaagagatccagcaggttgggggacctgagtgaaggtcaatgggacatcatcccaggtcccccagacagccccagctgaccccagagacttctcctggcctctggggaaaggattgtagagagggatagaaaataagagtatctaaaggttcaaagagaaaataactcatgtggtatatacatgcagccgggcagtcaggcagtaaattagcactcaccaccaagaagaaagggggagaatgagatacagggagagaaaagccaatcagcaccagcaatggctcctctgagatcagccgcttctgaaccatgggccccgcaccagcccagcatgggcaggagcaaagaaaagcacttgatgaaagaaacagaatgataaaccaaagggcggctttctttctatcaaaggccaatttccctctatggagggtcatggtccagtgactccagcgttgcaagagagaaaatgaagccgccgctttccctcaaagaaatatttaaagagccaaagccaggctttcctttggggtcttctttaagttgtgcgattctcagatcttttctaggaattatgttggttttattatctcatatattgtattgtctgcctgcagctctttaactgtctcataattctccccgccttggagtttaatcagtttagcctcttctctagagcactgggcaccttctgcgatattgtggtctatgaaacaaatgtggcccgctcctttcttctgagcctccccacttccaatcctccctccagaagtaaccagctcctggtggattcgctgccccttcgcaaatgcctgctacatcccagaccagggctgagcaccttgtttattttgtttaatcctaagtcaattctaattcctggatggtgaaactgaggcacagagatttgttaattttccccacctccccagttcaatgcagacttggttttgaacacaggactgagcagcttttccctgcggtgactgttaccctgggaggaagggcctgcagacatcagctccaatgctacccaagcaacatgtcactccacatgtgccagtaagctgctctcacaggcctgttattggctttcagagctcagataatgctctgttagatttttactcctggtatttggtggcatgctttaattagccctttatttagggatttgcttaaatcctgtaaaagtgggtcagagatttctgagcttatttcgcctctttctttgtaacattgcccaggcgatggcaggatggaggtgggtatcatgagagattactaacatttgttcatttcttgctatgcgccacgcacttaacgcctgttatcacatttaattcttacaatagccctctaaggtaagtggtattattcatgctttacaaacactgtaaaggagacttggagaggagacgggacctgctcagggctcacagatggcacatggcaggggcagaatgctggcccgccagcctcagagcacaggctggcgccctgatgccatccacggccagttgccacctcagtgtatcacttattgccctgtctccaaatcatatctgtagagatccactagactttgagacttcttggttctggaaaatcttttaatccagctaataaagctcttacgacacaagttattcctaactcacacttcattcctttaccatacaagcagttattttgttctgatgcataattaacattttgcacagcttctctgctgaccccagaggaggcctgagatgagcagggtcctataggtgggtgctgagctgggactcctgcccagcttttccctagcacctcctatgcccctgccaccctcagagggagagaccagggacaagggctgctgcttccttcctcccaggaagcatggctagggggggtctcaggaaacttacaatcatggcggaaggggaagcaggcacatcttccatagccagagcaagagagagagcagggaggtgctacacactttcaaacaaccagatctcatgagaactctgccacgagaatagcactaggcggatgatgctaaaccattcatgagaaactgctcccatgagccagtcacctcccaccaggccccacctccagcactggggattacatttcaacatgaaatgtgggtagggacacagatccaaactgtattataaactctggctacagtactgctattttaagaacttggggtgacatctgtataatagggtataatcacagcatcttcctgaaagcccaactttgagggctcagtgagtctggccataatgacttagcctgcctcagagggagcactccggaaagccttgtccattatttggcagttgtttcaattatctattgatgtgtaatcgccccagaacataatggcttaaaacaataatcacgttgggctgggcgtggtggctcacacgcgtaatcccagcactttgggaggccggggtgggaggatcacctgaggccaggagttcgagaccagcctggccaacatggtgaaaccccatctccactaaaaatacaaaaaattagctgggtgtggtggtgggcacctgtgtagtcccagctactcaggaggttgaggcaggagggtcacttgaacctgggaggtgggggctgtggtgagccaagatcatgccagtgctctccagcctgggcaacagcaagactctgtcaccaaataaataaagttaatgctgcgattcttggagccagggcctccatcaggacccggcaggtggactccttgctgctgcagggacatccctaccatggctctgctggggctggagggcccaaggtatcttccagctattggccaacgccacatgggttctcctctacctggtccttctttccatgcagccacttgtcactgagcttcttgacatggtgctggctactaaaaggccaaaaacagaagccacaggctgctgaagtctatacctggaactgaactgtgttacttccaacacgttctgcaggtcaaagacagtgaggaccaggcaagagggcccctgccttgtgttttagagcagagctgagcaaactttctctgccagggactagataaaaaataggcttttcctaaatcttaattttagatttttaccaagaggcaaaattgagcaactgttcttgccaaaatcattttacatttaaaaatgtaaaaagcatgcttagctcacaggctgtacaaaaactggatttggcctacaggctatggtttgttaagccctaccttagtgggctctcctctccccaccagtccccaggctgggctctccttatagggttagagtctgcagggccaatgcccactcacagcctgctctccgaccccttttagacaacaacctgggtactcagagcctggaattcccttccagggcctcttgccaagatccatccttcctgtgaacaccgccctgctggcgtatgcactcctgtggccagtggaggagtcagtggatggctgttttcaggggcagtgggacgcagttagacatgcaggttggggtgctatgatggaaagggcctgggaagagaagtggggtggcccatgtcaatagtacattcttaggcctccacatactggagtggaatctcaggggtccatgaattcttaagtcaaacttgtccttccaggttcttgggaaatgtaaaggactgaattgcatccccacgcccccaccccacaaatccgtgtgctaaagccctaatctccagtgtgactgttctgtagagataaggccttgaagaaggtaattaggggagaatgaactcatcaaggtggcgctctgatctgataggattagtgttcttacggggaggggaagaggccacaggagggtgcatatggaataaaagccacgtcaggacacagcgagaaggaggcagccagcacggcaccaagagaggcctcaccagaagcccacctgctggcaccttcatcctggacttccagcctccagacccaagagaaatttctgttgtttaagccacccagtctgtggtgttttataagggtagctcaagccaaccaatacaggaaggtacttgtgtcaaggggtgggaaagagcatactgtatttaaccgtctgttggcttgatttgtaatactcctatttagataaaggctgtgtgagtcttagttattcttgtcccggctccctcaccccacatgttagagatggcctcatcctaggtcaatagggagttgtgggttagggccaagtagattatgttataaagcgagatgtattttatatattcatatcttttttcatatatatgttcatatatatatgtatgtgtatgtattcatacaatcaacatcgttgtcactcttatcaagcagaacaggaaggaggaataaaggccccagagggcaggggcaccatctcagatgtctttgtcccattcacagctccttcttacacagagcgggcaccatgtgcgacagtaaagcaagagccaggatgaatcctggccccatctgccacctccccactgtgcgtgtgactctggtcacctcacttgagcttgctgtgcctcgacttctccagtggtaaacgagggtacgacctagcacggtgctggcttaaagactgtgctcaggggtggctctgattcacatttgatttatagtcaatattacattcttagtgcatctcaccattaaggaggttcctgaaaaactcggtgggggaaaagagaggatctgaagaggtgtttgatttctttgacgtaacaagaaattaaagaagtttgctgggcatggcgctggagaggtccggtgggccaagtcgattagatgatgtggggtgggccatgtcaatattacattcttaggcctccacatactggagtggaatctcaggggtccatgaattcttaagtcaaacttggccttccaggtccttgggaaatgctaaggacggaattgcacctgtcagatcagggccccaccttgatgagttcattctcccctaattacctccctcaaggccttacctctacagaacagtcacactgggggttagggcttcagcacacggatttggcggcgggggatgcaattccaaggtcgggtgacccaactcaattagataatgtttttctagacccagtcgctccacagtcaccttcccgatttctgccaggatcagctagccttaccgaagagctaaaaagagattcatcccaaacaagagcttccttggaagcattccatgaagacttgaaacggtgctgcctcccaccacctgacccagtattgtcagtgcctcctctgaggatcgcagaaaatcgcaccccacgcccccccagtgcacattccagacttggagaagcgcggcatggggtggcggtggggagaacacctttctgccagatcaaaagcccagcactttattcagagttttatttatggctccttcagaaggttagtccagtcacgcctccttaataaccgcctcatcacacatgattcaggtgtcctggggccacttcacgctcctggcttcctggcccaaagcccaggagaccgctgaaccccactgcctggcattatttgcgggcgagacaccactggtgaagtgtttgtcttttcttatggcttattttattgaaggttgttcttttagtcaaacaccttttcagttctttgtgtttgctgagcacccagggctgtctcacccagccttgaattgtttccaggcaccttgcaagccagtattgtacagttcttttctgcacagaaaaagtacagacttctggtttccagtccagcatgttaggagcttagacgtcatcgttccatcctgacaagtgaaaagctggactggaaaatcaacaattcttcctagagccattggcgcctcccacgtgggagacctgggttcatttcctgaccagtgcaccagcattggtggttgagtggtagaattctcgcctccctagagccattggaaaaatgaggtaacagggcaaaccactgtccccaaaattagacagacaggcagatacagataattacaacttaccagaacagaaacctccctggctactagtgctggggtgcaaaaacctgatccgtaatcggcaaattgctggaggctaagtgtggacaagtctgagaatcagtcacgggggctccacgcgttttggagttttccctcaggaagcgctgccgggtcctcacagtgaatgctggagaaaaatcgcctcatgcttctggcagggagaggagaaaagtaataaccattgtgaaatatgccagagcatcccgttcttcttaacaagggcttccctcaggagacgctaatgtgagcttaatctcctggggttttatcagaccctaacctacctagaagaagggacatccccgattccaatcccttccacccatcctctcccacccaagaggagaggggggagaccaagaagcacttgtgaaggtcacaatccacaggcacaggctccccacaagacagagacctcatcgtcggaccgtagcacacttcccctctccacacctcaccaccacatcactaaaggttcatgtactacagttcctttcacccagtgtgccatgtccagccctcaagaaaacaattacagcacactaaatggcaaaaaaaaaagaaagcaatttgaagagatgaagcaagcatcagatgcagactcaaatgtggcaaggatgttggaatgataaccaggagttttgttttttggtttttgggtttttttttgttttggagatggagtcttgctctgtcacccaggctggagtccagtagcatgatctcagctcactgcaacctccgcctcctgggttcaagcgagtctccggcctcagcttcccaagtagctgggattacaggcatgagccaccatgcccagctaattttttgtatttttagtagagacagggtttcaccatgttgcccaggctggtcttgaactcctgacctcaagtgttccgcctgcctcagtctcccagagtgctgggattacaggcgtgagccaccgtgcctggccataaccaggaatttttttaaactatgattaatttgctaagggctttagtggaaaaaagtagacagcatgcaagaacagatgggcagtgttaagcagagagaaattccaagaaagaaaagatgctagagatcggaaatactggagcagaaatgaagaatgcctttgatgggctcatctgtagactggacacagctgagtctggggtgactgagcctgaggatatggcagtaaaaacttccaaaacggaaaagcaaagactgaaaaaaaaaaaaaatggaacagactatccaagaactgtgggacagctacaaaagatatatgccctgggaacactggaaggagacgtaagagagaaagaaacaaggaatgtttgaagcaattgggacagagaatgtcccctgaattaatgtcagacaccaaatcacagatccaggaagctcaaatgacacaaagtaggacaaatgctcaaacaaaacaaaaagctaggcatatcatattcaaactgcagaaaatcaaagaattctgagggaagcccagagcggggaaagcaacacgttacctaaagaagggcaaagacagtagagtgaaatatttaaagctttgggaggaaaaaaaaaaaaaaaaaaacgaacctagaattgtgtaccctgcaaaattgtccttcaaaagggaaggagaaataaagactttctcagacaaaaacaaaggaaatgtgttgccagtagaccagcctggcaagaaatgttaaaagaattttttttgttttttgggtttttcttgagatgtagtcttgctctgtcccccaggctggagtgcagtggcgccatctcggctcactgcaagctccgcctcccaggttcataccattctcctgcctcagcctctcgagtagctgggactacaggtgcccaccaccatgcctggctaatgtttttgtatttttagtaaagacagggtttcactgtgttagccaggatggtctcgatctcctgacctcgtgatccacccgcatcagccttccaaagtgctgggattacaggcgtgagccactgcgcccggccaaaagaagttctttagagagaaggaaagtgacataggtcagaaacttggatctccatggggcaaggaagggcaggctttgcagatgctgccaccacccatagccccctgcaccagccgtgggcagccccactgtgttcttcaacatgaggccgcatctctttcaagctgtttgcagactacattccaaaaacagcagaaaatttttgtgctctgagcactggagagaaatgatttggttataagggctctttgctttcacagaatcatgccagggtttgtgtgtcagagtggttacttcacacaccatcaaatttccaagaaaatttactggtatcaagaaagaaatttgatctacgggaagaaatttgatggtgagcacttcatcctgaagcatacaggtcctggcatcttgtccatggcaaatgttagacacaatacagatggtccccagtttctcatctgcactgccaaggctgagtggttgaatggcagagtggcatgcatgtggtctttggcaaggtgaagagaatatcgtggaaaccatggagcactttgggtccaagaatgccaaggccagcaagaagctcatcattgctgactgtggacgactcttaataaatttgactcatgttctatcttaaccaccagacattccttccttagctcaggagagcacccctccaccccattcgctcgcagtagcctctcatctttgtgctcttgctgcagttccttgggttccatattttccttattcccttccatgcctagctgaattgcagagttaagtttatgattatgaaataaaaactaacaagagcatcagagaaggtataggtgaaagtaaaatacttttagtattcttgatctaacatgagtttttttcaaaataataacatattctagtgtgtgtgcatatcctatgtataagtgaaatgaacgagagcagtgatagaagggataagagggaagaattaggattattttgttatcatagctactttcactatgcatgaagtgttacagtgttatttgaaagtagacttgggctgggcgtggtggctcatgcctgtaatcctagcactttgggaggccgaggcgggcggattacaaggtcaggagattgagaccatcctggctaacaaggtgaaaccccatctctaataaaaatacaaaaaaaattagccgggcgtggtggcgggcacctgtagtcccaggtactcgggaggctgaggcaggagaatggcgtgaacccgggaggcagagcttgcagtgagccaagatggcgccactgcactccagcctgggtgacagagcgagactccgtctcaaaaaaaaaaaaagaaagtagacttggtttcgttgtaaatatatattgcatattctagggcaaccactaagaaaaggaaaaaaggaagtcactgatatgctaagaaaagaaacaatggaatcatatgaaatgctcagctaaacccgcaagaggcagaaaaagagtgggagacaaaaaaaaaaaaatggacaagggccacaaatagaagacaataacaaatatagcagtgattaatccagttatatcacaaataactttcaaagtcattggtctaaatgcagcaattagaagattgccagactagatcaaaaaacaagacttaactctatgcaagaaatccactttaagtataaagacatgtagattaaaagtaagtggatataaaagatatatcatgctaatactaatcaaagaaattaggagtcactatattaattgcagctagagcagacctcagagcaaggagagttatcatggaagggcattacataatgataaaggggtcaagtctccaagaaaacatagcagttgttaatgtgtgcgtctgacagcagagcattgaaatacatacggccaaacatgatagaactgcaggtagaaatacatgaatccactattttatttgaaggcttcagtgcccctctatcagaaatagacatatcccgcaaggagagaatcagtagggacggagttgaactcagcaatactgtcctgtagactctacttcatccaacaacagcagaataacatacattcttcacaagctcacatagaacattcaccaatatagaccacattctgtgctgtaaaacacaccttaacaaactgaaaataatagaaaccatgcagtgtcttctctcagaccacaatagacctaaactaaaaatcaataacaaagatagctagaaaattccaaaatacttgaagattaaagaacccttctaaatagtgtgggtctaagaagaaatctaaaaggaaattttaaaatattgttaaataaatgaaaacgtagatacgacttatcaaatgttatacggtgcaattaaagcagggcttaggaaacttatagtattgaattcatatattagaaaagaagaaagatctaaaatcaaccacctaagcttccatcttaggaagctagagaaagaagagcaaattaaatccacagtcagcaaaagaaaataaaaactagagcagaagccaatgaaatagaaaatagaaaacagggaaagtcaacaaacccaaaaggaagttctttgaaaacatcaataaaattgataagcctcaagtcaaattaagaaaaagagagagcacaagttactaataaatgaaagaggacatcactacagatcccatggatgttaaaggatgataaacaaacaccagcatggaaaactacagactaatacctctcatgaacatagatgcaaaaatcctcaacaaaatattagcaagttgaatccaacatgtatagtaggaattagcttctgtttgcagccagtataaacaattgcaaacactgctttcatttgatcctcttctgaccttttttgggaggggtacttaggctgttctgctgtttgcttcccattcttacagggaggtaaaaaagggtggctactctaaatagattttaaagcactttcattggtgtaattactattagagagatcattttctgttttctccaattgtacatagagccacaatttttgtctaaatagaaaatacataggctgggcgcagtggctcacacctgtaatcccaacactttgggaggccgaggtgggcggatcacaaggtcaggagattgagaccatcctggccaacatggtgaaactcagtctctactaaaaatacaaaaattagccgggtgtggtggcgtgtgcctgtggtcctagctactcaggagcctgaggcaggagaatcacttgaactcgggaggcagaggttgcagtgagccaagatcacgccactgcactccagcctggtgacagagcaagactccgtctcaaaaaaaaaaaaagatacatagtttggactctagactctttgtttttaatcttgtggtaattttctttatttttctttacttatttatttggcggtggttgttgttgagatggagtctcgctctgttgcccaggctaaagtgcagtggcacgatcttggctcactgcaacctctacctcccaggttcaagcaattctcatgccccagcctcccgagcagctgggattacaggcacttaccaccacacccggctaatttttggacaggctggtcttgaactcctgacctcaagtaatctgcccacctcggcctcccaaagtgctgggattacaaatgtgagccactgtgcccggccagttttcttttttttttatataatgcactttgtccaaggatttcaaatattgtagtcatttcccatgtgacatagtaagatccttgatcttggatatcgtatcttagcgtatttgtctgttatcccagttagtttggtaatctgtgatacctagcagagtgcccaacccatagaaatgtacagtcagccatactcagtgggagtgagcaaaggagagggccaaggagggtgtcctaataccataagaaaacagagaagcctgaagttttgctgctccagtaaaaaatcaatttaattgcctaaggggagatttttaaaaatctgtttgattcacttctgtaactgattcacttctgatttactatgtctggtacacagtaaattaatatttgctgaaagaacgaatggaaggtttattgtcgcttaagaattttcaggtgccaacaatcatttgagtgtttaacatataccaaaatgtttcctctgtccccctctgagccaagtttagtttatttccttgaataactttcacccacctgcttatttctggtaggccagttcttatttctaatgttaggcagtatggagttatgtatactcagctgcagtaagcacattttaatacacataatgccatttaatccccaccacctgcttgtcaggtgggtgctgaaatcccaagatcacagctgaggaaatggaggctcagagaggctaaccaacttgcccaaagtcacacagctcctggcctccagcagttgggttcggagctctctcacctcattctgcttcccgcttgtattctgagctttggctatgccattggaaaggagtttaattaggaagtatctcgattgagagctgggggtgtttcacttctcccctgctgcggggctttctgtttatgacgctctggtctctgttctgatgctttagaaagaggacacggtcaggagacctgaggcctctctcttcctgaccttgctgttaaccagcccaatgacctcagcaagccactgtgccactttgagcctcaggagcctcttcagaaccctgaaaacaccttttttattttattttaatttgttttagacggagtctcactctcttacccaggccggagtgcagtgcatcatggctccctgcaacctctacctcccgggttcaagcgattctcctgcctcagcctcccaagtagctggaatcacaggcatgtgccaccacgtccagctgatttttgtatttttagtagagacagagtttcaccatgttggccaggctggtcttgaactcctgacctcaagtgatcctatcgccttggcctcccaaagtgctgggattacaggcatgagccactgtgcccagcttgaaaacatttttctaaatcatccctccagacttagcaatccagcaattctaacagcccttttgattttgcactttagaggtaggcagtgtctatggagtggtcttggatcagatccactacttctccaacacaaccttgtgtctgccccgtgcctgaggtcctggtgctgggtacagaagtggatggcccagccccaaccagggagaagtctgggttgagtaggggcagacagtctcagtagacatgacaaaggctccaggagttgtgggtcccacagtagcaagtggaggagacagttatcaaacccaagatcccagctgtcagatcagaacacccagaaaacgttcaggcctgtcttctttctttccaaatggtgctgtttggacgcgtcagacagtgctttgaccatgttacatgtaaagagtgcctctggggtcctgtgttctatccttgggaatggatgatgtttttcaaaacaaatgtaatttttccatcaaaatgtttttgttttttgaaaaagaaaggatattctttgtttccctgaaacagtaaaaggacttgagtgtgttttatgcataaaggccaccgttattttgtaatgacagcttgggaagaggcttttgtggccaggccttttatttaagattgggctctaggggtttgctgtatacatacagcacaaaaatgaagagtgaaatcccagttcaagtgcagccgagaacaggagagtgaatctccacacacgtactttataggtccgtgggttccttcaagaaaaagcctttagagccaagagctcctgagtgaaggaggcatcttggctgttttgatcctgttaagcatttgggccccttttcagcaggactcatgtaaactgggcgagtacccaccatagctgtctagggaaccccactggatcaaggccttcagtatagaaaaagggtcagaagtatggatgccaaagccgatgaccagggttctaatccaagcgttgctgcttgcaagctctgtaacattggacaagctactgtgtctctctgtaccttatttcctcacctttgcaatgggccttatgaggattaggtgagcttcagagctaaagagcctggctctcggcacatgcctactgtggtgatgttggttacagctactgtcaatattgccagtggcatctaaaaccttcctgtgccgtcctcaagctctcccaggctggagatttcagaagttagaaagctcctggagtcccatcctctctgggaggcatttgaatgtgaagccctggtagagagtggaaggctgggtggccttggagtgacatccttccagctgctgcaggcccttggccttgtacaagacaagaagctaccccctggtccctttcatgccctggtcctgtgcccgggctggaagaaagctcattcatatctcacttttacaagacaggcagccatttgtaacatcctgacattcccccaagcagttggctcttgtaagtataataataatgatctaaatgacaaatagcagtaaaattgaatgacagtggccttgttgggggtctgtctttgaagccacagctcaacctcccatgtgcagcagggaaatccgccagctctagcccttcttgccaactctgcctctccttttgtgagtttctccattatgggaaaccagattggcgtcacagccccttgcctggggcttcaggatatcaggcagccctgggcttggctgtaagcccacattggcccacaagtgccagagacacctgctcctatccccataggggacagacaagagagtctcctcatccattccatggtctctgagcctggtcctcagcccaaagctggctccctagaccaatgagagccagagaaccagaatgggccataggagccggtggaattcagagggtctcagccagcactgtccaacaaaagtaaaatacaagccgaaactgcgtttagcagccaagtttttaacaagttggaaaggaaacagatgaagttaatttattaataaaaacatttaatgaaggccaggcatggtggctcacgcctgtaatcccagcgctttgggaggccgaggcaggcagatcacctgagatcaggagttcaagaccatcctggccaacatggtgaaaccccatctctacaaaaatataaaaattagccaggcataatgatgggtgcctataatcccagctactcgggagactgaggcgggagaatcgcttgaacctgggaggcagaggttgcagtgagccgagatcgtgtcatcgtgtcactgcattccggcctggtcgacagagcaagactttgtctatatatatatatatatatatatatatatatatatatatatatatccatatatatacatatttgtccatatatatatatttgtctttatatatatatgtctttatatttgtctttatatatatatgtctttatatatatatgtctttatatatatatatatatgagctattttgcattttttatactaagtcttcaaaatatgatgtggatttcacacctacagcacatctcagtttggactagccacatttcatctgctcagaaaccacaagtggccagtggccactgtattggatagtggctctagacagctgaatagggacagtatagccaacatcctaagtcgtgtgtatctgaatgtttatcttccagtggggctctctaacactattttcccttttacagtgaggctttggttaaccagaggtatttattaaccacaactgctcattgagagaaagatatgctttattccaaaaatgaatttgcagcggtgaggttgtgccctatacctgtaactgagatcttcaggacctcccgtgttatctggtacacaacaagccaaaggtgacacgtttctctgggaaaaaatgctctggctagattctaaaccccatcctattgttacaattgaaggcactgcagtgttcagagtgactttgtaatcttggcccagtggctgagcaggcgggctctatgcggctgatgaggatgagtgctgtcacgagaaaaacgagccttggcgcttggcattctgcttttggtaagccttggaggaaggagagcgtgttatcagaaggagtcatgggaatttaatgccttggaaatagaaaatgaagagccagctgggagccaacttgttgtagaacttaaagcaaaaccaatcaggtggccatggcctttaggattcatgaatccttctgaccagaaacagggctcccacacccttgcctgttgatggctttccaattcggacatcagtttccatcacccaagcagagagatgtggttggcaagactgctcagatatttgtagaatataggataggaaacaaagtataacctcctttgttcagccctcactgatcctttacctgatacacacagcaacactgttgcttcagccctgccactgttaaaaacaaactcactttgggaggccaaggcaggtggatcacctgaggtcaggagttcgagaccagtctgggcaacatggcaaaaccctgtctctactaaaaatacaaaaattagctgggcatggtggtgggagtctataattccagctactcaggaggctggggcagaagaattgcttgaacccgggaggcagaggttgcagtgagcagagattgcaccattgcactccagcctgggtaacaaaagcgaaactccttctcaaaaaaaaaaaaaaaaaatttaatgaaacaccaagtaacataacatacacagatggtggggactggctttaaccaagttaaacatagtttaacatagttacaagagcaaattttattcaagtgcttttgaaatatagttacttaaaacaactgaaatgatgctttccaataaatcatcttaatcctctgggccctttgattaatatttcattaatcccagtatcaatgtatttgaaaatacattgaaaagataaaattatatctttaaaataaatgtgtcagtattcagttccacatattaattgattggctttgagcaagtctttaaacttagagaacctattttctccctataaaatgagaatatacagtaagacctcacttaacattatcgataggttcttggaaactgtgacttcaagtgaaatgatgtataacaaaactaggtttttctccctcatcagcattataaggaaatgatgttatttgaggacctgctgtatgttgttttgcttaaaatcacagtttccaagaacttactgctggtacggagtgaagacggactgtaataacaactctgcatcatcagattacacaagatgtgtgtagtgggtacaacctgcatttggtgcccagaaggtggattttcactcacccaaagagaatttctgttgcccttctacttggtcaggacaggatttgtagaaaagctgagattgtgtgattcacttacatgaaggaggaagtttttagaatggacaactcttgctgccacagcaatccctgaaatctcagtggcttaacacaaccaatatttccttactgctcacacacagtctgatgcaaatcaggcaaccctcctccatcttgcaactgagccatctggaacaggtggcccctagaatcacagtgacaggaggcaaatgggcttttaattgcctcaacccaaaagggcaacatcacttcctctccctgtccattggccagaactagtcatgtggctccaaagcagaggagattatgaaatgtaggggagcacatgggctgtttggggaatactatctgatgctgaaggtttgctcctatcattctaatttattctctgatatggcaatatgatagcctattaagcgtcttcccactgacttgttttgttttgttttgagatgaagtcttactctgttgcccagtctagagtacagtggcacaatctcagctcgctgtaaactctgcctcccattttcctgcctcagcctcctgagtagctgggattacaggtgtgtgccaccggacccagctaatttttgtatttttagtagagacagagtttcaccatgttggccactccggtcccaaactcctgacctcaagtgatccgcccgcctgggccgcccaaagtgctgggattacaagcgtgagccaccatgcccagccatttttttttttttttttgggggggagagattagggtcttgctatgttgcccaagctggtctccaattcctggactcaagtgatcctcttgcctcggcctcccgagctactgggattacaggcatgagccactgtgcctttcccctattcatttttaagtttgctttctggggtaggtttatctttatcattaacctaggttttacaccactggaattgaagtgaaattatccccccactgcaattagtccattttcacactgctataaagaactacctgatactgggtaatttccgaagtaaagaagcttaacaagaagcatgactaggaggtctcaggaaacttacaatcatggcggaaggcagaggggaagtaagcatgtcttaccatggcggagcaggggagagagagagagacaacaaggcgggaagcgccaaacacttttaaaccatcagatcttgtgagaattcactcactatcatggagaacagcaaggggaaatccgcccccatgagccaatcacctccctccaggaccttcccccaacaggtggggattgcaatttgagatgagatttgggtggggacacgatatggtttatggacacaaaccatattgggaggtaagtagtggctttcaggagttggccgagcagttttaatggatttttttcctttgcttaagggtgtaggttaagtgtactaagcatgtgctaagtggagaatggataagcagacttgatactgccactattctcaaggaaatggctttgtttttgttagtttgaaatgagaatccagtgtataaatcagctcttgatcttttagactgacgggctgtggaagggacaactcatttcagttaaaataggcatttccaggctgggcatagtggctgatacctgtaatcccaacacacctatgcaacaaagcaaaatcctgtctctaaaaaaattgttaaaaaattatctgggtgtggtggtgcatgcctgtggtcccagctacttaggaggctgggtgggaggattgcttgagcccaggagttgaggctgcattgagctatgattatgccactgccttccagcctgggcagcagagcaagacactgtctcaaaaaaaaaaaaaaatagtattgccaaatagccagtatgaatcagatcttaattttcctgtgtttaatactttgctttggattgaactgttagagaagtacttcagtagctagctgctgagttacaaatatgttgatttttttcctatgcatttatcctttaacattctagtcccccaggaccatcttgagaacagtgtggcctgctgcacaagcttttctcccttgcaaattttgttggggaaagccacatttcccacctagcatcacagagtgtgtttttctttaattttataatttgcagctctacaaagactgtgttgataggagcaaggtgtgtgagacaataattatgtttgtggaaccttgtcacattttcttagactattattttagagaacagccctaagccaagacattgggtcttgtgatccttttcaaagaaaatcgttgggctcgttaatcctttgattcaagtcttttttaaaatgatattttccattttgactaattgaagatttcccactaagataaatggaagagacttatcatttgatcaaaattatagcagtgcttgatgtttgcctactaccctacagttttcaaacaaaatccatttacattcactcatttaattatccccctggtttttctggataagcagagtttcccatgggtggaatgcttccattcttgggaatactttatatttcctctcagatttatacatttctagttggcacagcttctgccgttcagatgcaggaaatagagaatgccactagagaaacagatggaaagacaagaagcagatccaagtatgtgtaagttcatttgttcattcatgcatccagtcacttatctatttattcattattcattaaacaaagttattaaatatactatggcagtgtctcccataggaggtaatatgataggatgtttaaaagtagaatgctggagtaggaaagcttccatgtaaacatttgttcagacacttgctaattttaagtttttcacaattttttaatctaggcaattgggaaattatatagtcaatctgtctttatatggtatagcagttctgtgttttctgttctaacttcaaaaaaacaaacggaaacagaattgcccagtgattacaatggcaccagcctagatcagccagcatttagctgactcccagatgtgtaagcacccagccaagatcagcaatgccccctgactggccccctttaaagacttaaacgtagtcctaaaattaatatagcaccttctttctgatccaggtagaagtacgtgtctaaatgtttctagccctatggtagtgtctgccacggcagcagtagcaatgggagcagctgtgttaaggaagagtgagggttccaacttttctgctgatctgggaagtagtggatgtggagggttgcagtgtcagagaaaaagcagccagtagacctaggtctcttggtgaaggcgatgagtttgaggagttccttgccaaaggctgggctggcttagatgaagatgcacgtgtctgggaagataactgggataatcttaaggccagaagtttgagaatttggaaaacgggcacttgtttactggtgggagtgagcgtgctactgttttgagtaacctggcaatgtgtctttttttttttttttgagacagcatctcactctgtcgcccaggctggagtgcagtgggggcgatcttggctcactatactctgcctcatgggttgaagcaactctcctgcctcagcctcccgagtagctgggattacaggcatgcaccaccacacctggctaccttttttgtatttttagtagaaacggggtttcaccatgttggccaggctggcctcaacctcctgacctgaagtaatccacccacctcggcttcccaaagttctggaattacaggcgtgagccactgcccctggccagcaatgtgtcttaaaaagttttacttttgagttagaagcatttattttgacccaccaattctattgacaggaatttattttgcagaaatagtcaaaggtcttgccaagatactcatgatatattattaaataaacaaactgaccacaaaatagcaggctcacataattcagtttttaatgcatatgtacacacatatcacacctagaaaaaaatatggaaaggttttatatggaaataacattaatatttctggatagtgatcataaacaattttacttccttatttctttttttttattttttttgagacggagtctcgctctcttgcccaggctagagtgcagtggtatgcagtcttggctcattgcaacctccacctcccgggttcaagcgattctcctacctcagcctcccaagtagctgggactacaggcaggcatcaccatgcccagctaatttttgtatttatagtagagacagggttttaccatgttgtccaggatggtctccatctcttgaccctcatgatccacccgccttggcctcccaaagtgctgggattacaggcatgagccaccacgcccgccgcttccttatttctttagcttttcattttcttcctaattgttctttaatgagcatgcatggcttctggaattttttttaaaagcacaaaaagattatttttaacagaatggttttacctggtaatggaaaatataatgacattggtatcagggagataaattcagtccagtccttttgggagagcaatttaccattgtatcaaaggttataaaaatatgcaactcctttgatgcaaaattttgtctgggaactggaatgagatgtatcatccccaggtaatagactggagactcatttcttggggtttcttatgtgtgtattttccaagttttcagaaaagaatgtgcagaacaaaggttgtaaaagaaattagagactccttgtaggttcctatgtttatatcattttcttgtcaaggaaatgagctacaaaggtgccagatctaatcttgtttacccttgttactgcccacacttaaactgttggtgcttgtgtttctcatcctacatgcagaaatattagtaatacattaaagaaatgaaagtgggcagacatgcagaaagttttatgtccgaggacatttaattagacattctgggccattaaaaaaaaaaaatcccagaacatttcaaagtaaaagttgtaagcgaaatggcagaatggttatgctgagtacctgttagtgtgtcttgaccttgaatcctggcatgtgatccatgggtctgggaattgtgtgcagcaggtacacagcgtacctgagaggtaatgaagccagtgttttaataagccctgccatacttagaaattcaaatccatgttactcccttccacgaagggaggttatagaattattctagtacttctgatagccacaaaggtagaaggaagtgtagaatgagctccctgtggacccatcaccaatttcaacagctgccagcatttgccaactcatttcatttatttttctcccacctcatttattgaagtgtttttttttaatttaagatatgtcagttcacccataaatactttatctcttttctatttcacccataaatatactcatttctaactgataagcacactttaaaaatgttttaatagtattattactttttaagagacagagtcttgctacgttgcccaggctagcctcaaactcctgggctcaagtgatcctcctgcctcagcctcccaagtagctgggactccagactcacaccaccacacccagccagaaaacatgttttctaactagtcaacataccattatgccacctaacaaaatgaatggtaagtcctcagtatcatctgacatccagattgtatcttaattttcccagttgtttcaaattttctttgttgcagttggctctagatactatatttgcttactatattttatgtcttttaaaaagtgttttaaaacttctgtttttcaatagactgaatgtatatcattgcacttctctgtgcaacacaagaaaactataatgtttccttatcatcatccttactattatactcttagtaaagccctgttacatagtttgatcatcttatatgtcagactcaaactctgaatgacctctggcttttcctttttttttttttttttttaattaaaaaaattttttttaatagagacaggatcttactatgtcacccaagctggtttcaaactcctggactcaagcaatcttcctgcctcagcctcccaaagtgctgggattagaggtgtgagctgctgcacccggcctctggctttttctcaaaattaaatccacctcagtgtccacatactttctgccagggaggataattaaaactaccttcagacagtgctgtggcatctccaggtggattcagaacaagattccccaaaccagccgtgggcagtgaatcacggggtgatagttctccgtgtgtctgatttgaagggtcctcttcccttggcgtaacatcaaagacagatcttagcacctcatctgcatgaactgagtgtataaatgcctacctgcttgacttacctgttctgacaggggctattggacttaccactaatgtaattgatgtgtttgttttcacacagataatcgcttatcagccgtatggaaaatctgtggactggtgggcctatggcgtcctgttgtatgaaatgcttgccgggcaggtaatgttttgctacattttcatgtttgtttattgctgtgttatgtgaatacttcagctctggttgggcctcgagagcaagacctgacgttttagtgcagctggtgttggcgtgacttccctgacccaggcgaaagagggagaaacgcccccttcaaagtggatcacgttcagtatgcacagaaattatctctggtcatagaaactccaaattgaaagctacaacctggagtgtagacagtgtcagtttcacgttatgaaatgtacatgttggccaggcgcggtggctcatggctataatcccagcactttcagaagccaaggcaggcggatcgcctgaggtcaggagttcgagaccaccctggccaacatggcgaaaccccatctctactaaaaatacaaaaattagccaggcgtggtggtgcacatctgtaaactcagctacttgagctactgaggcatgagaattgcttaagcctgagaggcggaggctgcagtgagccaagatcgtgccactgcactgcagcctgggcaacagagtgagacggtctcaaaaaagaaaaaaatgtgcacgttgatgacagcagtggcctctaagttttcagtatcttaaaactggggttgggttatatggttccctgcaagtttgtctgcaaagattgccccagctgctgccaatgtgtgtaattagtattattatttaaggaagaagacagttaccttgaagaagtgttttaatagtttctccccatctcctcctatctcacccttggcaattcgttgtaattttcactgaagtccagtgaggctgaacatccagttaaggaaggtaaattagctttctcttatgatgtgacatgtaccagataaccatgtgccttattgcctaacatggcactttctaatataatggccttaatatctgtgtcatcagggtgaatcgtactatctgccacttctaggcctggcccctaagacatcctttatgactgtcctcatgctctaggctgaaattaggaggaattagtggagaaatctgagaccctacaagatggtggtgctgatggatgcgagaagcctgagtctttgaatgaccctgtggtcagtgcccacccccacataggacacttccgtggcaaagtcccatgtgggggtggggcactgacccacaggttcattcaaggacacaggtttctcctgtccgtcagccctactaccttttagggtctcagatttctccgctaattcctcctcctttcagccgagcacagatcagttacataggatatcttaggggccggcctagaaatggcatgtatcacttctgcctaggttccactggccacttggccccagtgggacacaaagaggcaggaagtatagcatatctgagagctcagcaggggaagcaggcttggtaatcacgaagcaggcttggtaatcacccagcagatctctgccttatactaaacatgattctgccgtgggcagctttttataattcccagcactcacatgctagtgccaagacctgtgactctccatagccagaagccttagtcagagacaatggaaagagatggccatgctgtgcgacagagccacccccaaagacatctttgtttctggggaaaaagtcttcccttcccacatgttacgtccattgactcatttattcattcactcaccacgtatttattcactgaatgcttacaatgtgcatggccataaggatgaacaaaacagacgagaatccttaacttcgtgaagcttacagcttagaggaggagagacagcagacaggttagataaggaaaatgtataacacagcagaggtaagctaggaagaaaagtaataaagcaggaaagaagatagtgttgggggaggttgaaattggccagagaggataaggttaagacctaaaggaagtatggggttgtctgtgtgcatatctgttgaaagggcattccaggcagagggagccaccacgcgaaggccctaaggccagggaatgtgcagccacgtttaagaaatggaagctcccagcagggctagagcagaattgagctagagagggagggagtaggaggcctgaggccagagaggaagaggctctggatcctgttgttagcagtggtgcatccccatgaggctgcagcaacctcagttcttgcctcctcagaagaaagaatttgactgtggggcatcaggtagagtgagagcctaagacaagctgtttctgttttgttttgttttgtttttgagatggagttttgctctgttgcccaggctggagtcggtggcgcgatctcagctcactgcaccctccgcctcccaggttcaagcaattttctgcctcagcctccttagtagctgggattacaggcacctgccaacacgcttggctaatttttgtatttttagtaaagacggggtttcaccatcttggccaggctggtcctgagctcctgacctcgtgatccacccgcctcagcctcccaaagtgctgggattacaggcatgagccactgcacctggcctaagacaagttttagagaggaatgaaagttcatggaaaagctttcaagcaggagcaaaaggaagtaaagtacacttggaagagggccaagccggcgacttgagagatctagtgcactctttgacttttgacttggggttttatgcattggtgttcttccagggtcttacatctcttctcccctgattcttcccttgggttgggctgtctgcgtgcgcagtggcctgctagtgcttgggaggggcggcatgtgcagtgtgtttactggagttacgtgtgtgctcagctgaggcattcttcccttaccagtcagatgtcctagaaggtggtgtaccagttaaactccgccatgttgccttttcatgcgcgtgcttgagcccactcgcccaactcctgaaatcttattgggaagctgctgctcaccagtttcaggtgtttccctttattgggagactgcctttccttggtgctggctgcgaccaattattattttacagagagagagttaaccacctgatggtcgcctgacattcctggtgggtagggggagccctctcctgccctgcccatgtccgaacagccacctgttgtaacactgtgaccatgaacgtcatctccagatcagcggctttgcctctaggatgggaggctgtggatgatctctcctttatgtgtctttcattatatttcctaaatactgaaatggtcttgtagacattgaaagacataaagctttagcctgcatttgatcattatttctcaatggtgttaaggcttgactgacatcaaaagagtggtttattatttatttagttcccctccccccaccccaaatcaaagcattcctcttaggccaaatacgtccgggtgtaaacacagaaaggcagttcgtacacagtcaccatcagtgagtcaatggctggagaaacaggagttgtctgctcctcaagttaatttccccctctttaaaatttttacagtaaaattcggctctgaattacaggccccctaagagtcctgcttttcatgaagtcacaaaaagccaagtccccctcttgatcccacttgaatgttcagctcttgagtctggaaaacaaaccctgctttcattaagagtcacatttgcatatgctaacatgcaaaaggggctgggcggaaacgaagccaggatctgtttccgagggcgctttacaagaggtcacgtgagtagactcttggccagcaggagacaagaatttcagaacccaggtctgcaggaaagtcctcctccctcccgcagcctggcttctcccctctccaagccttcctgggatctcattcactaggggagaactcagggaatgctttcttctggcagagaagtcccctttggggggtgcattttgaagctctgccacactggcctcagacctcatttgcaaattggcctgaggtgatttacaggccttatttaaaggtttccctactaagctcacgccccctggagagcaccaggctccagctctcaatagttctgcaaactttctggcctgtttccaatatttcccacactgcttctcagagccacttagcctgccttatatgcatactttcaggtctccatcatctctattaaaaacggtgatggctgggcccggtggctcacacctgtaatcccagcacttcgggaggccgaggcgggcggatcacgaggtcaggagattgagaccatcctggctaacacagtgaaaccccatctctactaaaaatgcaaaaaaaaattagccgagtgtggtggcgggcgcctgtagtcccagctactcgggaggctgaggcaggagaatggcgtgaacccgggaggcggagcttgcagtgagccgagatcgcgccactgcactgcagcctgggcgacagagcgagactccatctcaaaaaaataaaagaaaaaaagaaaacggtgatattctttaaagatgacaccttagaccaggtgcagtggctcatccctttggggcccttgggaggccaaggtgggtggatcacttgagtccaggagttcgagaccagggcaacatgacaaaatcccgtctacaaaagatgcaaaaatgagctgggcgtggtggcaagtgcctgtcatcccagctacgtaggaggctgaggtgggaggattgatcgagcccggggggtcaaggctagcagtgagctgtgatcatcacaccactgcactccagcctgggtgagagagtgagaccctgtctccaaaaaaaaaaaaaaaaacaacaactccttaaaggcactccacattctggtgcaatggcaggcacagataacagcctttgttcctctaaatctccacctcacccgcctcaaacacagtgttttcattcaaatccccttcttcatctttctctctgactcctcaatgcaaatttaaatgtattcctaggctgtcactcagctcagaaaggataatgaaggctctacccagtattatccacagcccctccaagcttcagcaatcccagagacccagcaaacggaatagatgttgttattgaaaagtaagattaatgataaagtcgttgacagggttttggtctaagtttgtcctctttaatcgcagagggctgaagatgagcaggaaaaaaatagtttattgccattttcttctcatttgctttatttattgtcagcagccaagggggcagttaagaataaacagcctcagtctttattcagttcctggactgcttgacaaatacaatcacttttggggcataaatagtgtttacccagcactctaatgagcaccttgtgcctgcaagtgttctcggtgatcgtcataaagggaccagccctctccttatgcccttttctccctgggttatttatgctttgatttcactcctactgaatcagtaatcgccacttcatcttaacttcggcctgaattgtccaggggagcatgcctagcccccagcccaggtttccgtgatttgcaaataagcgtggcctccatgaccacttcctagctgagatcacaccagtgcagtgaggtggctcacagctgtgattaggaatccttttttgcaaaatgtgaaccatcactcctcatgtgttggtttccacaaatcacatattgttaaagtgggaaggagcgggtgagaggggatagaacccattcagaaaatgtttacaccaacccaagacttttcaacaggtagcttagcctggaacattgagtccaaatttgtagaaattaaaaaccatgggaatgggggaaagaggcgagagaaggcatccaaaatggtaatgtactaaagcacctgagtgacacgttacccccatggtccccaggctaagtggctggcagtaccagaaaggaaaaggaatagaattagtaacttttcaccgttcccttgccttcaacgccagggcctgagagcgagtgattacctgtcagatgctccagggagacttgagcctagagagacttaacaaaggccgtaaatgtgttcacatttttttaggctgcaggatgccacacctgggacgttattatggggatgtgattcagagaagaaaacaatgatatgcacaggtgtctctagtagcgttagtgatgagggtacatgctggaagcaattgtaaatgtgccatggaacagtggatctgtcctgatgacgcatcacctcaatggcattcaactcatgggaacactggcagcaacaaagaaaatgtatttgcaacagtcggtgaaaaacaaaaaaactccaaattatgcatcataatttgaatataagaggctgggtacggtggttcacacctatagtctcagcactttgggaggcccaggtgggtggatcacgaggtcaggagtttgtagaccagcctggccaagatggtgaaaccccatctctactaaaaatacaaaaattagttgggcgtggtggtgcacacctgtaatcccagctactcaggaggctgaggtgggagaatcgcttgaacctgggaggcggaaggttgcagtgagccatgatcgcaccactgcactctagcctgggtgacaggcaagacttagtctcaaaaaaaagagaaaataatataagaaagcataagaacccacataaaaataagcgcaatttttgtgtccaggtaaagggaatggggatgcttttttcgtagacttcccttccacaccatattacataattttcgtttaaaatagggcttcaggccaggcgtggtgacacacacctgtaatcccagcactttgagaggccaaggcgggcagatcacttgaggtcaggagttcaagaccagcctggtcaacatggtgaaactccatctctaataaaaatataaaaaattagccaggcgtggtgacgtgcacctgtaatcccagccactcaggaggctgaggcaagagaatcacttgaacccaggaggcagaggcttcagtgagctgagatcgcaccactgcactccagcgagtgagactccatctcaaaaaaataaaaaatataaaaataaaacacgggctccagggagcttttctgaatgtgctggtcattactgctattcaccaggtactcccagtcttcctccctcctggctcagtaggattgtacttcctttctcatgtgtatttgtggggtgtcagggagcaacatatgaccagcaccggccaatgagatcagaggggaggtgtccagggtggggctggaagcgcaggtacaagacatggcagagctgctgctccagcctttgctgcagcaagactgtgatggcagctgctccatcccggtgggtccccgaatgcaaccagcagaggcctctctgaccctcaacgtacaggtagcataagcaggaagtgaaacgggttgtcttatgctttggagatggtctcggttgtttgtttccacagcaggacccagcctatccttactgataccggaaggcacagttaagataccaatagtctacatcttgaagtaagccagtcacagggacgtgtatcgtatcaccccacttacatgagatgcctagagtagtcaaatcatagcaacagaaagttgaatggtggctgtcaggggctgagaggacaggagaatggggagtctcttttgtgagtggagtttcagttgggaagatgaaaaagttctggagatggccagtggtgatggttacggagaaacatgaacgtacttaatgccacagtacagtgcacttaaaagcggttaagatggtaaattttgtgagagagagagagagagagatatatatatatatatatagtgtgtgtgtgtgtgtgtgtgtgtgtgtgtgagtgagtgtgagtgtgacagagtcttgctctgttgcccaggctggagtgcagtggtgcaatctcggctcaccgcaacctctgcctcccgggttcaagcaattctcctgcttcagcctcccaggtagcagggactacaggcgcactctaccatgtccagctaatttttgtatttttagtagagatggggtttcaccatgttggccaggctggtctcaaactcttgaccttgtgatctgcccacctcggcctcccaaagtgctgggattataggtgtgagccaccacacccagcctgtgttatatatattttatcacaattaagaaaaaatagtctctatctttgcaacagaggttatatatattttatcacaattaaaaaaaaaatagtctctatctttgcaacagaggaaacagactaggaaaaaggatgcctttgatttgatggtattccaaagctgggaggaggcacttaactactcctcttccctatacccaagaacagcccccttttaccttcttcaggttcatgccaccttcaaccagcaggaatttggggaagcaacacagaagctgcatcggccagcagctgggaaggagggaggcagcctgattcccatcaattcattagagctggaaaaccatgccaggtctctagcgcagaggccagtcgctctctacgggatgacttgaaacatctcaggcccccagggctgccccacccccttcattttcagaactcatcactgcatattgtgcaggctgtgaatcagccttctaaaatttaccccaacacccttgccctcattagagtcttctttacatgctgggtggggctgtagccgagtaccctctgcctcacttcacccctaccaggagcagtgttggatgtcacccttcacagtggggcaggcggaattgctcataatggctaagagccccaggctccaaattcaggatgcctgggttagcacctgtgtcctgagactgatttgcggagtgagcagtgccacccaagccgtctgcacagcacgtgacatgcagagagaggctgagaaatgaacgccactgtggtcactttcgctgctcctaccctcatgcccacgatgctcctgccttattgggtaacatagactcacagcggtgaaaaacgtgaggagcagagacatgtcccctccctgacatgtggtgacagagaatccctaatccttggggccacatcaaggctggaatgcacaggctctgtcacgggtgtttggtcttgtggctttgttacagcttgggcatcttattccaccaggcaagcctaagaggcctctgagaatccttccagccctagactaagaattcacattgagttaaacagctttgttcactgcaggacttctcagggcctgtacaatttaaatgttaaagcaaattgccagagaggggtagaggatgcaaacttggacccaggaagatgctgtaggattaatgttctaaggaatattctttggggagtgtcagtatccagccttcagtggggcccagagaagacttgacagtaaaagtcctcctttcatctatagaatcgaatccctgatacagccattcaccttcagaaatgagcatacgtggggacagctcacctggcaaagctggttcccatgccaggagacaattaagtaggtgtggtaggccagtgccctgcacagaatgttccccaaacgattcctggccttccacatttgaaggtggggtggctgcagctgcattgacctaatcgtcttcaaatgaggagaagcttctcactaccctactcaagacagatttctggggaagctccacctgtgttccttagagaacgtttctcttaggcctttggtttgcattgtctgtgacttggcccctgcagcgttcctgcagctaagattcaagcacctccagagaggctgattgaatcttgctggcgcctttgtcactgcccaacaaggtgcaccccatttagcccgcttcgggggcatgcagcctacacggtcgcacagggcccaagcccacaagagctctgtgcatttggtttggtgctccgctgtcgcatctggaaattcttaataatttttcaatgagggactcccgttttcattttgcactgagacttggaaagtatgtgtctggccctgaccacaggccctcttgggccatgtggtgaggtgccagtcagtgacctggaagcagagcctctgccccgctccctgccagggcacatttacattgcagagagggtcacacagccagttcaggagccttgagcccctgcagggtgcaggccacgccctcagcagaaaccacaccatgtttttgttttggaaacagagtcttgctctgtctcccaggctagagtgcagcagcgcaatctcagctcagtgcaacttccgcctcctgggttcaagtgattctcgtgcctcagcctcccgaggagctgggactacaggcgtgcgccaccacagtcggctaattttttgtgtttttagtagagatgaagtttcgctgtgttggccaggctggtcttgaactcctgacctcaggtgatccacccacgttggcctcccaaagtgctgggattacaggcgtgagccaccacgcccagctactacatttgttttagttatgaaaatctccttcgccaaaactcagccaggtttatggatcactgattagggaaaatgagaaatgttatgggtatcataaaatagatgtccagaagaagcaggctgcgtgctgttaggcagggaagatacggtggggtggacacaaggatgacctgcactgtagctccgtcacagctctcccccaccactgcctgcctgccctgccctctacagatgaaagccacacgtccccctgatggcacaggtagctgtccctgctgacacaggtggccgtcggcagcctgcaccccctggtgggtgcccccccaagctgccctgggggcctctcaggctccatgttgctcctgctggtggaagttgctgtggccagctgcccctgccctgttctgagtccctcacaggcaggctcattttagctctcttcacccacctgcagcttccaccaaattgaaccttccttacaccaagcacttacaacagaaaaagaggcctatttatttgtatttccagaccaaaaaatgttgagtggtaccagacacccaggcctctctctgtcctcccactggggctctctgtagacttggcatctttccctcagggcacgtggctcctgtccaggactgggcaggggactgaggtcaggtctcgggtgttggatgaacaggttgaggtgatttgtgggtggtggttgaggggagggacctacttggctcaacggctgcctctgacttgggagaaaatgtttgataagaagggcatccttctgactactgcgaagttacctgtgatcgaggattcagttcaaaattaagccaaacaccatcactgtgtgacctgcccgtgtcagccaaagtgactgactcctctttcccacgagaaaggaacatctcaagattaaacaagaggattctgtacaagcgctggtccttgctctgcctttctgacgctaagctcaaggttacgcagccaaagggggagcattacggaatttcccatgaacgctttcctcctgtgccatcccgccagagtgaccgggaagtgatggatccctcaggactacagacatgctggaggaaaaagttcaaagggcattgtgagctcagcctttcctcctagaaggtgctcaaggcccctcccaagagagttgctctgtcttaaataataatactgctaagttgccttcattcggcgcttattgggtacaacataaaatacaaggcactttactcccagaaaccccatcttacaagttggagaactgtgtttttgtttttgtttttgagacggagtctcgctctgtcacccaggctggagtgcagtggtgcaatctcagctcactgcaagccccgcctcccaggttcaggccattctcctgcctcagcctccccagtagctgggactacaggcgctcgccaccatgcccggctaattttttgtatttttagtagagacggggtttcaccatgttagccaggatggtctcgatcacctgcccttgtgatccgcccgcctcggcctcccaaagtgctgggattacaggcgtgagccaccgcgcccggcctggagaactgtgttttaaagaacgaagtcatttgcctgtggacacccagctgggaagttagtagagctagaattctggtccagatccacctgactctaaagccacaaggtcccacggggccaccgtgccttcctctctcagcctggtaactgtaaacccagtcaaagcggatgagggaggagtccaatggaagctaaggtcccatcactgctgctgtgcagctggaaggccctccctcagagcagctgcttgttgggtcagaggcccagtgtgaattactgggaacatcctcttaggccacgttctcaagtccccttcaccccaaatgaaagtgttggcattttctaccggccacccccaccttctgaccacaaagccatctgtaacctaacttgatcgtaattagatttttagcacataattacaagattaatggattaatcataatttatttgcaaatcattaaaaacattactcaaaaacactttccctaaagattgtttgggttgcccagggcaagataattaacgagacagaggggaaaaaatgaaaaacacacaaccgtcaatctcattaaagatgatcaaataaaccgtcaagttagctgagcaaactgtgcagcctgtggtggggctgagaaacctggtctgttccttggtgctgaattggctcttcaggcaccatgtgaatgaattactctgcctaaatactttcccatctttctttttttccggaacagcctccatttgatggtgaagatgaagacgagctatttcagtctatcatggagcacaacgtttcctatccaaaatccttgtccaaggaggctgtttctatctgcaaaggagtaagtcgatttggataccttttgtgatcatggaccaagagctttggtaggagaaatactttccccacacttctaagagagatggcagaaacaccacaaacccacaccactgcattttggccatcgagggttggggcttggtgtcatgccccaagataaccagcaccccaactttggacagcatggattagtcttggcctgttttgaactctgcacaaaccgaaccttgtagtgttgctcctggcctggctgctttcactcaatatggtgattgaggatttagttcctcctttcatattgctatgcagtgttccactgtgtgaacacaccatcgtttccttatccattctactgggcagggcacagtggcgaaagtgaaggccaagagaatggattggaatcccaatacttcctgggactctggcccagtcacctaatgactgtactgcacttttcattctaatccatttcataaaattgtggtggggactaccagatgtcatcagagtcccttagaaagtatgtgctctcgtctcctgtcttacttggtgtgacttagttctttctttgctacacttttcttgagctatagcatacatacagcaattggcacaaatcatcaatatgctgataaatgaatcttcacaaaatgaatccacccatgtaattgcacccagctcaagaaaccatgtttccaccaccctggaagccctctcctgtcccatctacagtcactaccccgccccaagataacctgccccccaactttggacagcatggattagtcttgcctgttttgaactctgcacaaactgaaccttacagtgttgctcctggcctggctgctttcactcaatattgtgattgaggattttgtctgcattgctgtgtggggccatagttcctcctgtcatattgctgtgcagtgttccactgtgtgaacacaccatcgtttccttatccattctacttctggtggctatttggattgttcctgctttggtttgaggctgttacaaacagaactgctgtgaaccttctggggcatgtgttttggtgaagatatgcacacactttggttgaggaaatgctctaggaatagagttgctggtcatgacttgtctagttttgaatggtcaagagttagatcacaaagctattttcaggcttagtaagatggagtacaatatacccttaacagtatctggtgagtgtgatcatttgtgaggcatttgtcacgtgtcatccaagagcaaggcacttggaagagatactgagatcgggaggaactggcttctgccttcagagagttcatagacagtgtttgtctctgtgtcctgcagtgggcaagtcggaattaactagtcgccttccttgttatagcatttatttttctaatctatgagtctttgattgataacattttggcccagacaatacgtagacatatgatgcttattatggcatcctctgtgatgctagactgtgatgctttcagcacacacaatttttagtgattgcatgcttttttttttattactagatacatgtatagcatggtgtctccaaaacagacaacgtgtgagatgtctgtttaaattcttcttccatttggccatgggttcagattgcttccttgttcccttgtcttgaaaaccaccataggaagggctattcttgccaatgtcatttttgtgagttggcttcacttcgtacaagccactgagtgtcttggtcagctctctgagatgctgtccaggcgtccacaaagtcagggctgtaggcagagctaggcaaatggaaggtgctgtctgtgggaagcccttgacatccattgttctccttttctccttttcctttctagctgatgaccaaacacccagccaagcggctgggctgtgggcctgagggggagagggacgtgagagagcatgccttcttccggaggatcgactgggaaaaactggagaacagggagatccagccaccattcaagcccaaagtggtgagtccagaaaagcagcctgttttcggaaccccatgtccccaaattctgggagtatcccactcacctcttttcttggagagaggaggccggtggcccctggcttgtacagggtgaggaaacgggccaggtttcagccttgtcctcagtcctgtggcctcagcagccgggattcctgctgccttcagagagtaaggaccgataaggcagggaggggaaccctgtgcacacttcatcctccagctggacagctgcagagcacccccgcacgactagggagtgagggcagctgtgctttaggtctggactttgtggactcgcacccagcagggccgtattcacagccttcagtcctcagcaggactcaggcttcgtgtttgtctctggttttcctgggtttgcctggcaccgaagggagctctgaagcacaaccccgtcctagccagcaactaggcagggcctgggccccgccccctcttccaccactgcctccactgcggggagtgagtgtcagccaccaattctaatgttgtcagcttttttcacactctccctgtttgattcccatttttttcatttatttaaacactgtatgccaggccctgttctgagtgccttacgaatattaattcactcaatcatcccagcagccctgtgagatgggtactatggtccccagtttgcagtggaggaaacagtcacagagaggctgagtaacttgccagaagacacacagctgatagatggtgaaaccaggacgagtctttgtcctcacctactgcaccatcgctccatctcagcaactgccctgacgctgatgctgtgggccctaattgttgattgcggccagcaagtgcctttcatgtttatatctctagaggtaaactgagagcctttaagaagtcagcctgctcactcaccacctgccactttgcagagcctccaagggcgtcctgtttctaagggccgggcggactgtgccttccagctctgccaccatcttggccagcatcaggcagctccccattgtgcctctgcccggggactgcagagagctgctttatgccacagtcagtttcagaagcatcgccctgttggtttcgctcaaatgtgtctcctctgacaggtgccccatgagcaggccaggggacccacctggggtggcacagttgccaactgggtggcacacagccttattcttagagcagcaacttcctcaccatgtgtgcctctgtgtcctctaccccaagaataaaactgctgttggtgagcccactggattttatttttcgaagatatttttagcacacactgaagaaaaactaaaattaatcaggtcagttgacttcctcctgaatcatcgtttcaaataaggcccttttgtatctgacacccccgccttttctttagtcagccctgcacgggctcctgcccctcaacatacaaaacccggtctggaggtttttgggggtggggagagtgattaatggtgctgcaagtggtctcagtagaaaattctgttagggattatttttttttcctcttctgcctttaatatttatttgttgtcttaaaatatgaaggttatgcaacagcatcttgaacacagcttagtttctttataggaacaacgtagagatgcgtactgaccccgccttgagggttgggcaaaatccaattacctgtcagtcactttccagaaagcgatgagttgcagcaaaaccaaccataaaacatgtctttttctatttattgccacgttatggcagaagagagtgtttatttgcatagtctcccacattttgtggatactcggccctaagctcggatatagggaagacaacagggcgacttggctccgcaggcaagaatgtgaactgttctctgtggtccacggaaatcacaggaagcaaaattgtacccatggcaggcagctgagttaggagcagtgtttatttatattttattcctggagcgctactgtttgctggttttttttttttttaaattattatactttaagttgtagggtacatgtgcacaatgtgcaggtttgttacatatgtatacatgtgccatgtcggtgtgctgcacccattaactcgtcatttagcattaggtatatctcctaatgctgtccctcccccctcccttttgtttgttttttaactgaatgctcgttaaaattaagaaggaaggataaattgcccctggctgtgaagaaatagcccctgaactcacaaacggaggcagaaattgtcgacccaggccctaaaactggaggtttcatgcaaaaggccccgcttggtaaaagctctggccagaaggaaggaagagatttctcaggcagaagcccgtgttctgctggaaaacctgtgcacaaaagaggaaggagctagaaagaatacagacagacaggaaatggacccacagagggaacaacgacagtgaagatagaagcacgtggctgcagggagacccgtagacgctgtgttcaaaagcggagagcgtcaagggcagagagataaatggggcaagctctggttcctggaagggcagcgatgtgcctcttgagagctgtttcctgtagtccttgccccgtgccaggcagccgagtgaggctcatcgcagcatgtcatgcaagggctggcaccaccgccttcagcggtctctgaggactgcactctgttcagtggtgacacgctggggcagagacaccacgccaagagccattccagtggctggagaggacatttagaacagcaaaaagcaaccaaagtcgaagctgcacaatacgctctggttaatacaaacagcaggagagaactagcggcgtagaaaagttattctgggatgtggtgttccagcttccttggtgaaaaatgtactgtagtttcctgatccagagctaactgaaaagtgaaatgtgtttacagagctgagcattctctaacgggtcattttgttatttcaaagagagatgtagcaatgccagcctaaatagtgctgctggagaaacgatcaggcaaatgtcacacagctagcgactctcaccgtgagcccatttctgagtggctctcgcctctcagcagttcttataatcctggctcaccaaccttttctgtcttggtgaagtctgcctgatggttttttagcaagcgctggtgagtcagtttccctgagacttgcaggcttaaggacaggtagctgttctcacgtgcggtgatgctcctggctcccatggaattaaacctttgcttactaccaaataccagtagcgggacttcaggttctcacagttatttgcaaactgcttctacagatcagattgagcttgtaggatcaggagtctatcatctttgttttattaatttttaaattttttgaacctccaatgaaagagtcttccagaatcactgacttccctaaggagggtagaagcattccactgctggacagccacagagcttatcagggaatcatggttcctctagtgtgctgtcttaatccctcttcctgactgccagagtgacttgactgaagttaacctttagaccgcagtgccatgcaaaatgcgatcccagcgcaaaaagcatctcacaatgccgtgatccatcaggaggttagcacgggactttccatctcacggcgacattaagatcaagatctgcagtacagctgtgggctggattctgtataaggtcacacgtaaaggagaacagaaagaggagagtgaccagcatcgagtgtgtgggacagtggccatctcccttagcagtggccaccttccctggcagtggccatctcccctggtggtggcagggtcccatggcggtggtcatctctcctggcagtggcaagcctggaggctgagatgtgagggaagaacctgcccctgtggcagtcaacagtgggagagtcctgtcctggacagagccatgtctgtccctaaaaagctaccatgtgccaccgtgaagatgatgattttctggaagatgggacaatcacttctcagggatcattttgtaaaaacaaaagcaaagacaaccacagacagcagtgctgtgagccctggacacaggcagccaacaactagctcttcctctttatgagcaaaacacaaaacgagctggtttcggggatctcttcaaggaagcacaatgtgaagcatcctctgctccccggacatgaggacggtcagctcattgaggaccgtcagctcagtgaggaccgtcagctcagtgagggccatcagttcagcctgatgttctcaacaacaaacccgagtcatcaaaaagaggcctgtaggccaggcgtggtggctcacgcctgtaatcccagcactttgggaggtcgaggcaggtggatctcctgaggtcaggagtccgagaccaacctggccaacatggtgaaaccccatctctactaaaaatacaaaaattagctgggcatggtagcacacacctgtaatcccagctacttgggaggctgagacaggagaatcgcttgaacctgggaggcggaagttgcagtgagcccagattgcgtcattgcactacagcctgggcgacaagaatgaaactccgtctcaaaaaaaaaaaaaaaaaaaaaaaaaaccggaatgttcagaagagtctaggtaaggagaaattttaagtttaaaacagatgtcgcctctggaaagggtaatcttcagtgactgaaggagcagtggatgtccaccctacctcccagcgtcaggtgagcgtggaggcactgtggggaggagggtacagccagcagcttggcccagcaaccagaaggctcaccgagggaaggaaagcactttcggctttgccagaaaaataaaagctccaggattctgatccaccgtcactttgaattttgtagctttttattctgatttagaattaatgtgaatgaaatggccaagaacagccttcaaatttccactcatcctgcttgtaatcagtagcagtttatacaaataccaggagcataaggttaattgatttttctttttttagttctagccgttggcaccaaggagcagaatagctagttcataggcaagccagaatcattcactgtacttaaatggttattagagagggagaaattaatctataatgttaacacaagaaatgtattccagagtggttaggcagagcacattggaaatagacctttcacagatggccattttttttgtgaaattactttaagtattctgttttttaaaaggcagaaaaatagaactttcttcaggacattgtctccaatgacccacagcaagagccaaagagaataagaacattgaggacatccctgtagtgagaacacacaatcggggttccttttcccagtcaccacaaagtccttcatttcccagtgccattagcttgtttagagagcttgatgatcatttaattatcgaagctggtgcaaggatccttttttttttttaattttattttgaaataatttccaatttcagacttgtggaagggccaggaaagtaatttaaagaactcctgtattcctttacccaggttccctaaatgtgaacattttagcatgttcgtgttatattgttttttttgttttttggggggggttttttgttttttttttttttgagacggagtttcgctctatcacccaggctggagtgcagtggcgcgatatcagctcactgcaacctccacctcccaggttcaagcaattctcctgcctcagcctcctgagtagctgggattgcaggcacctgccaccatgcctggctaattttttttatatttttagtagagatggggttttgccatgttggccaggctggtctcaaactcctgacctcaagtgatctgactgcctcggcctcccaaagtgctgagattacaggctgacctcggtatcattctttttctatatctctgtctgtgtgtaggtacagacatacacatctgttaggttggagcaaaagtaattgcggtttttgccgttacttttcattttttttgccattacttttgcaccaaccttaatatatacttatttttttctgaaccatttgagagtaagttgcagagttaatgcttctttacacctagataattccatgtgtatttcctgaacataaggacatctcctggtactatgttcttttaataattactccagcaagctaggtatgtagtgcaggggctctgcaggtaaaaggaggagggagggtccctggcatggctgtgtcacagatcagataccataggcagcttgggccacatctcatcagttctctagggtggcaggcagcttcattctcttggcctttctgttgggccagtaacaatgatgccaattaaaattgagatctcaagatgggaaggtttgtcaacaacatacaaacactaaccagccattggagactacagaagtcacatcatgctgtatctaggtttgatttaagcctctaaactagtctaagacagcaccttttacttggctaattagaggcaagcagtttttcctattctttaatcattactctctcaaatacttttctgcttagcagagaaattggaagaaatgagacatttaaactaataatataaataagcatcactactgcaagcctctgggagcttcaatgatgagtgacggcataaatacagaccctgtgtacatcaaagtgtatgaattgacaggtttccattgttggcagtgaaggtttccaacaacgatggccattacaacttttcttggaaaaagagctttaaatcctctaaatctggccattaacataaagaccaaatggagtacatgtttttattccatagattacagcccatgataagccagaaccttcaccctcatacacacgtggctctcacacctacaggaatcccctcatttaatgtgtggcttatggcctctgtctatcagcaaactcatcaacggaatcagccttcctccagaagagagttttccctttctgagataatgctgcagtgctgtaggtgagctgagtactgtttaattttgtcagagaaaccaaagactatatgaagttggcaggaggtgaaaggggtcccaatcccttagaaaaaattactattaacatgctctctctatatggtgaaatgaacagttaagtggtagagaagggcataaatgaaaagatatctccccaactactggtcctactcttcatgatcttttctgtaaccttctagaatgtttctgtatgtataaacgtatacacagatgaggttgtgctgtgttaaacacaccttgcgtctttcacgtagcaatgtatccgacaggtgtttccgcatcagctcacgtgggtttatagcattctttgcgtgtccattcccgattctggacttgcaaggccaggaactgactattctccaaatcctctcctttgtccgttcttattctccagactttgtgtaccaaaatgcactggcttcagtgggcctccaggtcttcggtgagcacgtttccagaaccttgggtgactaaatgagcaaactaaccccactttataacccttaaccgtgtgcccctgcttgtgttggtcatgcacgtagcccgttccctgagcatgctaatcttcagagaaagggcagaccaatggccagacccctttgctggatagctccttagtatggacattacctcccaggaagcccaagtgaaatgcaccagcccatttctgctgttatttaacttaaaagaagacgctgtgcaaccacaagtcagagagctgtgcagatggtggcgatgcggttgctaaggcgctccactgtaccccagcactgggacctgaatacaagtgagggttcccctacgatgaagtacctcctgcatttggtcatcgtaaggggtagctcccacctcgttaggtttcctttctccatagtcttgcaacatccctttactctttatttgttctgcatctttcctcttcttctgggttttgtttggttttgctttttaacagcagtgttttgagctactcatatttcccataattcccatagctgagaccatggggttgtattctacatgactgagacgccgaggtaaagggcaggggtgagaccaacacgtgtattgctcatgctcagaggcctctcccaggtaagaatcagccacgaagccaactcctgcattgcatctcagtctcccccacaccctatcacagaatgaaaggggctgtgagcaatgtgtttgccacacaaggctccagtgggggcacactgcaatcccagattccacccagagtccgtgtcattcatgttttgtaacatctttaccaatgcctgatttctcttgggtccgttgcattcattgaagtttgaccaaatgggtaggaatatcaaaaacgacaaaggagttcattcctgaatccagagatcagaaagagggaggtagcttattaataacgttccttcgtccctcagagatcgatcacatgccttttacatgctagtgcttgcttcgcagggtgtaccctatgtctgtcctgcctcctcgctgaggaagggcctcatgcccactagttccctggatcctcacaacagcctgggaaggtggatggtcacatcaccatcttaccttcgcagagagatgcactgagtttgccaaagctatatacattggggctcttgatctctggccacatccttctcccctctgtgtccccactttcccttgggtgccgacatcgcctggtctcagggagttcagcagtcacacgctgactggttgggtctgaccaccccagtgccctcttcccctttatctctgtcccatacccatcgtgtggtacgtcacatcccagagggcaaaagcctcagtcggcaaaaggcgcgggtgacctttggaggtggagacagtgcgcacccagcccagttttgctcacaaggtataaatgttacttttagtggccatgtgctgttgggtggcctacagctctgaggccatggacagccacacctgcccgctgtcacagactgctgtagaggctgcccttccaatggaggtggtgatccacctgcctgcctcatccctgaggagtggcgggaggctgcctgcagtcatcttttactcattcacttggcgttcatgcagtcatgctaggtgccccctcagccctttagcctctttgcttcttcttgctccctgctcagctccaagatggcacccgaggccattgcccatcaagctcatggtgatgagtaaggttagatcattgatagtaggaagaatctcttccacattaggaatgcagtaccttcttgaatctactgcttttcctttctccaaggatccaaaaatctctggttttccttatctttttcagtaggcggtggtggtggtggtggtggtggtggtgatggtgatggtggtggtggtggtggtgacggtggtggtggtggtgacggtggtggtggtggtggtggtggtggtggtggtgacggtggtggtggtggtggtgacggtggtgacggtggtggtgatggtggtgacggtggtggtggtgatggtggtggtggtggtggtggtgatggtggtggtggtggtggtggtggtggtggtggtggtggtggtggtgatggtggtggtggtggtggtggtggtggtggtggtggtggtggtggtgatggtggtggtggtggtgatggtgatggtggtggtgatggtggtggtggtggtggtggtgatggtggtggtggtggtggtggtggtggtggtggtggtggtgatggtggtggtggtggtgatggtggtggtggtggtggtggtgatggtggtggtggtgatggtggtggtggtggtggtggtggtggtggtggtggtggtggtgatggtggtggtggtggtggtggtggtggtggtggtggtggtgatggtggtggtggtggtggtggtggtggtggtggtggtggtggtggtgatggtggtggtggtggtggtggtggtggtggtggtggtggtggtggtggtggtggtggtggtggtggtggtggtggtgatggtgatggtggtggtggtggtggtggtggtggtggtggtggtggtggtggtggtggtgatggtgacggtggtggtggtggtggtggtggtggtggtgacggtggtggtggtggtggtggtggtggtggtgatggtggtggtggtggtggtgatggtggtggtggtgatggtggtggtggtggtggtggtggtggtgatggtggtggtggtggtggtggtggtggtggtggtggtgatggtggtggtggtggtggtgatggtggtggtggtgatggtggtggtggtgatggtggtggtggtggtggtggtggtggtgatggtggtggtggtggtggtgatggtggtggtggtggtgatggtggtggtggtggtggtgatggtggtggtggtgatggtggtggtggtgatggtggtggtggtgatggtggtggtggtgatggtggtggtggtggtgatggtggtggtggtggtggtggtggtggtggtggtggtgatggtggtggtggtggtggtggtggtggtggtggtggtgatggtggtggtggtgatggtggtggtggtggtggtggtggtgatggtaatggtggtggtgatggtggtggtagtgacggtggtggtggtggtggtggtaatggtggtggtggtggtgatgagggtagttttccacattaacatcttgcaaaacaagtagttcaagatcttctccagtttgacttatagtagattgtctatttccagggctacttttgctaagagctgtggaaggctcatttataatgcattggcagaccttctatggtggaaaaggagacgatgtttctcaccaggccgaatctggagtagaaatagctgtgctgccccctgcctcttggtgggggaaggggacttctctgtggtttgatctccctcagaataaaaagttctcctgagtctcgtagctgatctaaccctcaggtcatcctgcagcccttccaggctttcttccggtttcttgctaagacacacccatggctcatttctgtcccgtggttgatgtggctgaacttcagtggttcagtttctactgttcgccctcggcctgtgcctgcctcttatctctccaccgaagtgaaccaatttaagaaaagctttcatttgttaaagtgagatttctccctctttgagttcagggaaaattccaaagagatttacagtgagaaagaagaggaaggtgtttccagcagtgagcagttttgagaccagaagccacacagcagcactcagtgtgactgcagggcagcaactgggttgatctaggctccacaacttcccctttagctctgcagacctcagcacaggcggagcacgagcccttaaccaggaagggatttttgccccattttatcacagtacttagctttttgagcagtgggcaccctcaggagtgacccttctctggacaccagctttggaattggatgtcctcaagcctccctctccaggcttctcagtggggaggtttctgtggtcccctttttagagcttgggaaatctccttttagtttgctttttaatttttccttggcagtaaagccatggcttttggaaacgtcccattggacgatgattcatgaatgccataaagacaggactaaaaggaaagggtcagacctgtgcactctttttgcagaacacattgataaatttagagcaggacagacatccagcctagacgtctatctgtgcagccctaaattcatcaacgtgtcctgtgaaatggggagagaacattttactttgctttgctcatccttttagggactcagtccttttattagattttttccagaaattccttcttgctcatctttgcatggttagtgagtatcaagagaagcacagatgatctctcattaaaggagcacacatcccagcctctgggagccctgactgttgattcacttgaattcttccaggcaataagcattgatgaatcaggttccaaaaggatgttcccaatgccgactctactgagctgtcacacttgctccaaatgcttttgccttgtgacttctgccgcttctccattctccgctctcacatacggctgctcctgcctgattccctagtttggcttcatgtctgccctcactctgatcttaggacctactcagcctcacacagtagtcttgttatatccctgagtttctcagcagcaggtactgttgacatcttgagccagtcattctttggggcgggggcagtgtcctgggccttgcaggatgttccacaccatccctggcctctgcccccagatgccaggcttgtcccacccaagtcatgatgaccaaaaatgggttccctgggggaagaatcatccctggttgagaaccactggtataaccagaggagggctatttctttggctgttgtcatctgaatgtggaattccaaggaaagttggtttctgtttgtttaactgatgaattaagtacagactcccgattaatttctaggaagaaacagcatgcccttatttatttttcaaagagcctttctccgtgtttgcaaatggcctgtgcacatagggtgatgtgaattgcagattctgcctctgctgaccttggctttgaggtactttgtgctcttccaaggaaatacaccatggaaacgtggggtgtgagagtggaagctttgccagcccacatgtgggaggcaggacggatgtgacagtaagcctcatgtctgtatggctccacagagtaacttgaaagcccacaggcagcccctgcctctcatcccctctgccccaccacacacatcacccacatactcaccattcattgtggtgtgaaatctccttgggtgaagagtagatggttgcttattaaaatggaaataagcccagaggctggacgcggtggctcacacctgtaatcccagtactttgggaggccaaggccagcagattgcttgagcccaggagttcgagaccagcctgagcaacatggtgaaaccctgtcaatacaaaaaatgcaaaaaatagtcaggtgtggtggtgcgcacccgcagtcccagctactcaggaggctgaggtgggaggaacggttgagctcaggtgttgaggctgcagtgagtcgtgctcccaccactgcacaccagcctgggtgacagagtgagaccctgtctcaaaaaagaaaaaaaaattaataagcccagaaaggaaagctgtttgtcataaagaccttactttgaatttatgacatgctttccacctcaacaggtacttaggagcaggttttatttgatgaaaagtaggtgggaaaagggtaatgaaagtagcttcgtcgctgggcgtggtggctcatgcctgtaatcccagctactcgggaggctgaggcaggagaatcacttgaacccaggaggcagaggttacagtgagccgaggtcacgccactgcactctagtctgggcgacagagcaagactccatctcaaaaaaaaaaacgaaagtaggttctcaagcacacctcctagaagataaagtgtgaaaaaagagctgagaaagcacagcccgtgagactcaactgccttataaaaacactagcagcacgtgctggcctctcgcctcggctgggttctgtgcaaaaccccatacatttcaccttcctgacagccttgggcaggaggtgtgattgttctcccagtgttacagatgagcaaacttggtggaccccacttcacagttaatccagagctattctctgttagagacccaaggatgcctggttagtttgaaatgtgtgctagctcagagttaattcatattggccctgtggtgctagcagcaggtccaagggcagtaattggcagcatcttgaaaatcattcttaggatccttagtgaaactcccagctcttcctgcttcagagtcaccctgggctcccggggacttcaacacgccactacccttgtgggtggctgacaaggtgaagagaacactccttccccacttttggggtcaggctaccaagccgtgctgcctaagcggctgtgtgtctcagcgaccccagtgcaacagttctgcctggagtggaccctggaggagaggaacagccgagacagcaggcctctccctgcctccccagggcgccatgcaaacatcctccagcctgagaccaccctgcaaataagctccagtcagtcacccagcctgcccgctggccagctctgtctaggtgtgctaaatcctagctgggccaggtgcaaatctcccagccttgccgccacacctacctcatatcgcttgaagcttaatttaggggctggggttgctggagcagcccagtaggaaggcaaggataacacagtttttacttcactacaaatattgcggcaaaaaaacagatgtggggcagtaactcaccccgtcgcttggtccaggggtaactgcctgcagccccagccgacatcctggcctttcaacacggagctgtgactgacggccctgcgtgcgtggcttccgtgctctcagctccgcttgctcggtgaggtggacgtgaggggacaggggctgtccccttgttgctgcctcattgccagccgtgcaattcccacccagggcttctgttcggggtgtttcagggtttacagttgggtaactcgttgttgtctgctgtgcctggcttttcaatccaataggcctgcaagtcctccgagattcctcctcctaaccagcccggagttccccagggccgtgcccctccccagagagggccctcggagagctgctcccgcattgtcatgttgactgacctttccttctttttgtcttttctccacagtgtggcaaaggagcagagaactttgacaagttcttcacacgaggacagcccgtcttaacaccacctgatcagctggttattgctaacatagaccagtctgattttgaagggttctcgtatgtcaacccccagtttgtgcaccccatcttacagagtgcagtatgaaactcaccagcgagaacaaacacctccccagcccccagccctccccgcagtgggaagtgaatccttaaccctaaaattttaaggccacggccttgtgtctgattccatatggaggcctgaaaattgtagggttattagtccaaatgtgatcaactgttcagggtctctctcttacaaccaagaacattatcttagtggaagatggtacgtcatgctcagtgtccagtttaattctgtagaagttacgtctggctctaggttaacccttcctagaaagcaagcagactgttgccccattttgggtacaatttgatatactttccataccctccatctgtggatttttcagcattggaatcccccaaccagagatgttaaagtgagcctgtcccaggaaacatctccacccaagacgtctttggaatccaagaacaggaagccaagagagtgagcagggagggattgggggtgggggaggcctcaaaataccgactgcgtccattctctgcctccatggaaacagcccctagaatctgaaaggccgggataaacctaatcactgttcccaaacattgacaaatcctaacccaaccatggtccagcagttaccagtttaaacaaaaaaacctcagatgagtgttgggtgaatctgtcatctggtaccctccttggttgataactgtcttgatacttttcattctttgtaagaggccaaatcgtctaaggacgttgctgaacaagcgtgtgaaatcatttcagatcaaggataagccagtgtgtacatatgttcattttaatctctgggagattatttttccatccagggtgccatcagtaatcatgccactactcaccagtgttgttcgccaacacccacccccacacacaccaacattttgctgcctaccttgttatccttctcaagaagctgaagtgtacgccctctccccttttgtgcttatttatttaataggctgcagtgtcgcttatgaaagtacgatgtacagtaacttaatggaagtgctgactctagcatcagcctctaccgattgattttcctcccttctctagccctggatgtccacttagggataaaaagaatatggttttggttcccatttctagttcacgttgaatgacaggcctggagctgtagaatcaggaaacccggatgcctaacagctcaaagatgttttgttaatagaaggattttaatacgttttgcaaatgcatcatgcaatgaattttgcatgtttataataaaccttaataacaagtgaatctatattattgatataatcgtatcaagtataaagagagtattataataattttataagacacaattgtgctctatttgtgcaggttcttgtttctaatcctcttttctaattaagttttagctgaatcccttgcttctgtgctttccctccctgcacatgggcactgtatcagatagattactttttaaatgtagataaaatttcaaaaatgaatggctagtttacgtgatagattaggctcttactacatatgtgtgtgtatatatatgtatttgattctacctgcaaacaaatttttattggtgaggactatttttgagctgacactccctcttagtttcttcatgtcacctttcgtcctggttcctccgccactcttcctcttggggacaacaggaagtgtctgattccagtctgcctagtacgttggtacacacgtggcattgccgcagcacctgggctgacctttgtgtgtgcgtgtgtgtgtgtttccttcttcccttcagcctgtgactgttgctgactccaggggtgggagggatggggagactcccctcttgctgtgtgtactggacacgcaggaagcatgctgtcttgctgcctctgcaacgacctgtcgtttgctccagcatgcacaaacttcgtgagaccaacacagccgtgccctgcaggcaccagcacgtgcttttcagaggctgcggactttcttccagccattgtggcattggcctttccagtcttgggaggagcacgctgctttggtgagacacccccatgcaaggtcctcagagtagccgggttctaccacaaacagaaacagaatgaaagtagctgtcagtccttgtagagagccgctctgtttcctcccagaagcatctcccagctaagctcgcattatttttctcctctggctgtttgcctgaagttcacagaacacacaaccatgaaaggctttttgaggtgagaggcccaggtggtcctggcaaccctgagtagaaggagagacggggtagggaacgggcccggccagaaaagaaccatttcttctgccatcttttatgcaccatagacatcgagactccagggggtcctggctcccctgtccctgcagccctgcaggtcagtgcatgatctgggttcgtgtcctgaccaggtgctcctcctttgatccgaggggaaagggactggtttatagaaagagcctaggagacaaaagggccagtccccctgcccagaatggagcagcagcaggacagacccccacgaggccccccagagaggaggaagatcccacggaggaacacatgaggttagggacccttgttcagcaccccaaacagcctgcctgtttaaagcaggcagcaggcttaggccttccctgcaaccccaacacccacaagtttgtttctctaggaaacacattcactgtctcagctggctgttactctctcagaccatatggcaaagttttccaagaaaatgccccgacaggggtgcccagcacactgcctgagggacaacagacatcagaacaaacccccagagagaaacagtcaaaatcagggcccggtgcagtgttgtcatgtggaacctgctttatccattgctgagtgttgaatgtgggtaatggttagggctttccagatctcagcagccaaagacagttattgttggaagactgtcatgtagataaccatgagcaatggctcgcctcagaatcagttcataaaattctatggtactggccccttcgtgggtattgtgtgaaatgagatggtggcgaggggtgcgctgtggaactgccgcagccacgcaggaggtccctgggggatgctttgggaagtccttgcccctgagcactgcctgattgccagggcctgtggaggtctaggccgcctggcagaatctagcaccgtccgaatccccgcaggacccatggagctatgaccacaccaggccattcaaatggctctgcattatcttcccttggaaggtggccactcctcggtggcagggcctttccctgaggctgcaggccgtgggctggcagcccgtctcttggcatttcaattgaaggtcaccaggtgctgggtttgaaaggaagtcactggagtgctgccaggggccgccctccaaggttaatgagaggcccacatccaggcaagaactaattcaaaaggcagatcagaaaccacaggagtcaaaattattgctccggcagtgcttcccttcctttcatccactggcctcgtgtggtccatgcagggccactgtctgccctttctgatgccacgtattaggctttcttactcagaattttgatagaaaaccatggggccaagagctctggaagcctggccggaaagaccaaggttcatgcagcccaacaaatgattgttgagcacctctcggagccaaagtccttaggcgagtgtggtgacttcctggaaggaggatgcagacttccagagagcccccccaacggacgtgctgagaagggagagggaggcgggggctgtagtcaggaaggagccagagaagaacagggtttgggtgcatccagaaatatgcctgcagtaggagggagaggaaggggtgccaccgtcaacggcttcccatcggaggtggttggtgcagatggaagtttctgtctgctggccctcaagagagtgttttgccagggacacagtctgttcctcctcagaaaacaccccccaaatgctaacaacatccccaccagctgctagaagcccctttcccctccccaccttgaagtagctcatagttctctgggcagagccagaccatccagtgtaccccagaggccagtaggttcctgcccattttcctctctggcttcctgccaagaattatggcagctgaggatgaatggagaagtaaaaacaactaacaccgcacaactaacaactaacaccgcagttcccacctgggttccacttagcaggagacatttcggagggttttttttgtttttgttcctgttttttttttttttttgctggaatttgttttctcagtactgaaaagagaaaaagtgacaatcttgtatttttaaaagcctcggaaaggtgataccatctgacagtcattttctcacgttggtcttctaaagtcacctatttcttgtgtgtgcacatcacaccatttcctgtttctttataacccgacaagggtaggagtgcctgtttcccctgctgggcacaccagacaatcgtaatcacaaaacagacactgagccaggggcccaaagggtgtgatcatgagagttaccgggacagcagtaggcatgacagtcaccaggaaggacaagggtgctctgttgttagtggccacacaccaatttgacaaggagtgttgcgaaatttttatttatttatttatttattttgagatggagtttcactcttgttgcccaggctggagtgcggtggtacaatctcggctcactgcaacctccacctcccaggttcaagcgattctcctgcctcagcctcccaagtacctgggactacaggtgcgtgccaccacacccagctaaattttgtgtttttagtagagatggggtttcaccatgttggccaggatggtcttgaacccctgacctcatgatctgcctgcctcggcctcccaaagtgctgggattacaggcatgagccaccacgcccagccaaaatatttttttaaagtcattttccttaagctgcttgggctacatgtgaaatacactggacggtcaacattcctgtctcctcccatttgggctgatgcagcagatccagggaatgttacctgtttctgctgctagaagatccaggaaattgggaaggttacctgacgcacacatggatgaaggccatcatctagaaatggggtcaaccacaattgtgttaattccgtagtgtcagggattcttcgggaaggtcaacagtatgaaggattctgacccctgtgcctcccatttatgtgatcaggtgacagttaataaccgtggaggtcacactcagccatccaacagccttacagtgaccctacacaaaagcccccaaattccaaagactttttcttaacctaaaggaagaaattatttgttaattccagtagagcaactgaatatactgggctatttgtacttttttatagagaactttaataataattctttaaaaatgagtttttagaacaaagcaactgacgatttcctaagattccaatgccctggagcttgtaggaggacttagcctgggtcagctggagcacccccgacctgatctcccactgccagattttcccatgctcctagggtatggagtccacgtgggaatgactgcaagttcaggtggaacttggccgactgatgctctgcgagtttttaatagacactggggacaactgcttaaggtttagaaacttccaaaccacaggaaagacatttttagtgtcccccatccagaggcagccctggaataggattcccaggggtttctgggacccctttccttgctccgtgaggctctgtggccatcttttggcaggaggaggatgcttccttggctctgtgcccagacccgcctggtccccaggtctctcaccttgggtgaagattcagagatgccctgtaaggattttgcccactgggcaactcagaaatacttcgatctcccaagatataagaggcagcagcaaacgtgcctattgacgtctgtttcatagttaccacttacgcgagtagacagaactcggcttttcagaaaataggtgtcaagtccactttataagaacctttttttctaaaataagataaaaggtggctttgcattttctgattaaacgactgtgtctttgtcacctctgcttaactttaggagtatccattcctgtgattgtagacttttgttgatattcttcctggaagaatatcattcttttcttgaagggttggtttactagaatattcaaaatcaatcatgaaggcagttactattttgagtctaaaggttttctaaaaattaacctcacatcccttctgttagggtctttcagaatatcttttataaacagaagcatttgaagtcattgcttttgctacatgatttgtgtgtgtgaaggacataccacgtttaaatcattaattgaaaaacatcatataagccccaactttgtttggaggaagagacggaggttgaggtttttccttctgtataagcacctactgacaaaatgtagaggccattcaaccgtcaaacaccatttggttatatcgcagaggagacggatgtgtaaattactgcattgctttttttttcagtttgtataacctctaatctccgtttgcatgatacgctttgttagaaacattaattgtagtttggaagcaagtgtgtatgaataaagataatgatcattcctttgtgtagttggccttatttacatccctttgcggtatggcaattatttttcctccagtgttcaaaaaatagcatttgacttcagacacactccgcagaacactttcatctcttcacctgtttttcaggcatgaccctccatttatagtggcattttttttttttttttttttttttttttacttaaaaaatatatcttgctttgaatcaaagcccagacagtgactgggatggcgttctggcaggtcctgcgttcattcattcatgcactgttcacagagcccctgcttagggccaggagttgtgtcaggccctggagaagaagaggctggcatggcccctgcctgcacggagcttacagtcttgtgccccaaactgcaagggatgcccagcaactgatgacatcatctaaggctggatggtgcccttcccctggaaggaacgattccagaatgaattctgctcaagtctggagatgttttctccaaaaataggtatttttcacacatcccgttggccacactgtggatgcagcttcaggaccgtccccactctgagtgtcagccgcctcgttctgcatttattcacggttgaaaaattgggggaaatgttcaaatgtggaacattcaaaaatacccagcacttaacaactcaacgcaatagagggaattgtcctcaaaaagaattaaaacaggctgggtatggtggctgatgcccataatcccagcactttgggaggccaaggtgggaggatcacttgaggccgggaggtcaatgctgcagtgagctacgattgcaccactgcactgtagcctgggtgacagaaggagaccttgtctcttaaaaaaaaaaatcaacaacaaacaccaaagccaagatccaaccttggtaaagtcaatctttgctgatttcctcacctccttttggggaatgctctcccctcgtgctcatggcttcaacccactgctgccaccctccctcccatagccccctaatcctgcagccgcccagcccagcctgttcctcccagcacactctgcatccacacacatgcctccctgcgttctcttccctctgggccttgctcccagccagattactcgagtgtcagcatcctctcagtggatttttccctccctaagatgccgcggtcacactcaacctcctggaagtgaaggctctttcagctgccaatgcgagggctggcggggaagctattttgaagaaaaacaaagggcaattttcaggtcttcagagcaatgtggtctctgccccactgggctggccctgaccttcactccgggctggttgacctcacatacgtgtgtagctgtggctattcgtcacgttacgttgcccagcagagtagcttaccatggccattgagcatgccctctgcttccgccagtgtgctgttttatttcatttttgctgcaatgcggaatgaagcagagtgggccaccaagcagcatcctcacaggcagctggtgacccgaggaactgagtagctccacccaagtttacccctgcagggaggtctcgggtgtatccaatatggctggtcctcccggccccacagaggcagcagggacaacctgagcaccaggcagtggacaattgctcttccaggggcactgtgcgccacccaaagtggatgctcaaaaacgagtccttctgtccagtactggcctccctgtcacatgcccaccatgcccatcaagttcatgagcaggcactgttggggctactctaagtcagggttctcggccagaggccatgtagccacccacggggcacttggcaatgcctggagactgttttggttatcataactagaaggaagttgcattggcatcgagtgggtagaggccaggggcgctgctaagcatcctgccatgcacaggatacccccagccctcaacaaggtgtcatcccacccaaatgtcggcgctgctgctgttacaaaccctattctaaaacacactccgagttccccttctctccatctcccctgttctttctctctggcctccttgaccctcatggccctctctgctcagcagccagcaggaccttgcctgagcaggccccttccctgttgaaagccctctgtggctcccatcacccagccttcctcatggcctttcatcctcacatgcccagctctgggaccaaggattcaatggttggggagagtgagttctctctctctctgtctctgtctctctctctctctctctctctctctctgtgtgtgtgtgtgtgtgtgtgtatacgcacaccctttcccatgagaatagaagctctaagaggagccggcttgtccatcctgtttgctgctacatcccagtgcctagagcagagcctggtagataataggagctcaaaatgttcattgaatgactgagtcaattaatcgttcccaaaactgctctgagcctagcaacgtgttccagacacccttactgggccatgggatttgccctggaggtgttcacacactaatgaagtagataagatatacaaaaaagaactaattaaagatcatctctcaaactcatgatgagcttcagcctaggaaacaccagttctcaacctctgtccttcagcccagaatctagaggcgatggctgcctatggttacacttgagtgattatttaactccctgagcttcccccctgcccctggcttattgtgtgctctggggatgaaattatggttcagctaaaatgctaatgcacacgggcaaaggccaaggccatctattttcacactctgtccccatcctgggagtgcacatcacagagagcagggcattgcctgcagggagtgggtgagaagtgcttttggctctaagaaagcagaactggatgtctccccaagattctttttttaacaaagctaattcaataaatacattgcaaagaggcctattctagccataaggggagaaagtggaaaatggttctagtgaaatgaaagagctagtggtgggctcagggactcaacagacaggtggaaatggcacaaaccaaaagtctaaagggggctgtaaatgggaacgcgcaaactgtgcacgcacacacacacgaacacacatgcatacagagatgcacacacacacatgcacacagacacgcaaacacacgcatgcacacagacacatgtgcacacacagaggcacacacactgattgattaccagaagtgtaccaggcactcttctaagttctttatgtgcatttatttcaatcccacaatgacagcccctgcccccagataggtgctgtttactgtgcccattttacagaagaagaaagggaattccagggaacttaaataacaacacataggtgaacaacaccagacaaatggagccaaccgaaagagcagagatgtgagcacgccagatgccttcctgggggaggaggcagggaggctgaggtctgatggaaaggctggaaaggagaggtcccaaacaagcagacaccagcacgcagggaggaggggaagggctggcatgcgcgcagtgcctagcttgtcatctgaacacacccatctcatttaatcctcatgacacctccatgggctggaggccattgttcacatctcacagatggagaaactgaaccccaaagtaattaaccagcttccagatacgcaactcctaagcagcacagccaggctgggcactgagtctgatcttcctagccttgtcccatgagagggtcagatgtagcattgggtagggagcttcagggccagaccctgttggggaacttctccccccactgtggtttcattcaaagtccatcctattaccaagggggatgttccttgcccttagctgactctgatgcctatgagactagatgccctcctggaactgtttccagaaggctttcttccaccatcaccctccttctctcgacatttttttttttttttggagctgtctgggcgtgggaggagagagaaaaatagcatcacagttctcagaacacagcaggtgcctctgcagccgccctcacctgactgacttgcctggaaggcccaggaggaaggaggaagcgggcaggaacggctggtgggccccaggctccccctcccaccacaggacagccctacattgagaccccagctccacctaccccaggagtcaaaaacaatccaaggcaagcatcatccagtgagcagaacaacttgtgagaaatcactgatttcttgggggcactgggcagcccggggaggaaaggttgggcttggttaggtcagaatactgtgggaatgcttctgggtttttggaaaatttacaaaaaataacacctgcttattgtagctaatacagatgaggaaaagaaaatcccaacttcccaagatggttaaactttttgattccttgctaactttatttattattcatcatcttgttatcttttcaagactgtaccatggtattagcctgttttcacgctgctgatagagacatacacgagactgagtaatttacaaagaaaaagaggtttaatggactcacagttccacgtggctgggggtggggtgctcacaatcatgatagaaggcgaaaggcatgtcttacatgacggcagacaagagagaatgagaatcaactgaaagggataaccttgataaaaccatcagatctcacgagacttattcactgccacgagaatagtatgggggaaaccgcctccatgattctattatctcccactgagtccctcccacaacacatgggaattatgggagctacaattcgagatgagatttgggtggggacacagacaaaccatatcaacctcaaagccctcttatgagactccactgggccttgacattggtcactgaaagctaggatcacagatgttaacacacacatcctttaaacattttgttatgacttttttttt

SEQ ID NO: 1481 - DNA, 3703 bp, Homo sapiens
ggccgcagctccccggcggaggcaagaggtggttgggggggaccatggctgacgttttcccgggcaacgactccacggcgtctcaggacgtggccaaccgcttcgcccgcaaaggggcgctgaggcagaagaacgtgcacgaggtgaaggaccacaaattcatcgcgcgcttcttcaagcagcccaccttctgcagccactgcaccgacttcatctgggggtttgggaaacaaggcttccagtgccaagtttgctgttttgtggtccacaagaggtgccatgaatttgttactttttcttgtccgggtgcggataagggacccgacactgatgaccccaggagcaagcacaagttcaaaatccacacttacggaagccccaccttctgcgatcactgtgggtcactgctctatggacttatccatcaagggatgaaatgtgacacctgcgatatgaacgttcacaagcaatgcgtcatcaatgtccccagcctctgcggaatggatcacactgagaagagggggcggatttacctaaaggctgaggttgctgatgaaaagctccatgtcacagtacgagatgcaaaaaatctaatccctatggatccaaacgggctttcagatccttatgtgaagctgaaacttattcctgatcccaagaatgaaagcaagcaaaaaaccaaaaccatccgctccacactaaatccgcagtggaatgagtcctttacattcaaattgaaaccttcagacaaagaccgacgactgtctgtagaaatctgggactgggatcgaacaacaaggaatgacttcatgggatccctttcctttggagtttcggagctgatgaagatgccggccagtggatggtacaagttgcttaaccaagaagaaggtgagtactacaacgtacccattccggaaggggacgaggaaggaaacatggaactcaggcagaaattcgagaaagccaaacttggccctgctggcaacaaagtcatcagtccctctgaagacaggaaacaaccttccaacaaccttgaccgagtgaaactcacggacttcaatttcctcatggtgttgggaaaggggagttttggaaaggtgatgcttgccgacaggaagggcacagaagaactgtatgcaatcaaaatcctgaagaaggatgtggtgattcaggatgatgacgtggagtgcaccatggtagaaaagcgagtcttggccctgcttgacaaacccccgttcttgacgcagctgcactcctgcttccagacagtggatcggctgtacttcgtcatggaatatgtcaacggtggggacctcatgtaccacattcagcaagtaggaaaatttaaggaaccacaagcagtattctatgcggcagagatttccatcggattgttctttcttcataaaagaggaatcatttatagggatctgaagttagataacgtcatgttggattcagaaggacatatcaaaattgctgactttgggatgtgcaaggaacacatgatggatggagtcacgaccaggaccttctgtgggactccagattatatcgccccagagataatcgcttatcagccgtatggaaaatctgtggactggtgggcctatggcgtcctgttgtatgaaatgcttgccgggcagcctccatttgatggtgaagatgaagacgagctatttcagtctatcatggagcacaacgtttcctatccaaaatccttgtccaaggaggctgtttctatctgcaaaggactgatgaccaaacacccagccaagcggctgggctgtgggcctgagggggagagggacgtgagagagcatgccttcttccggaggatcgactgggaaaaactggagaacagggagatccagccaccattcaagcccaaagtgtgtggcaaaggagcagagaactttgacaagttcttcacacgaggacagcccgtcttaacaccacctgatcagctggttattgctaacatagaccagtctgattttgaagggttctcgtatgtcaacccccagtttgtgcaccccatcttacagagtgcagtatgaaactcaccagcgagaacaaacacctccccagcccccagccctccccgcagtgggaagtgaatccttaaccctaaaattttaaggccacggccttgtgtctgattccatatggaggcctgaaaattgtagggttattagtccaaatgtgatcaactgttcagggtctctctcttacaaccaagaacattatcttagtggaagatggtacgtcatgctcagtgtccagtttaattctgtagaagttacgtctggctctaggttaacccttcctagaaagcaagcagactgttgccccattttgggtacaatttgatatactttccataccctccatctgtggatttttcagcattggaatcccccaaccagagatgttaaagtgagcctgtcccaggaaacatctccacccaagacgtctttggaatccaagaacaggaagccaagagagtgagcagggagggattgggggtgggggaggcctcaaaataccgactgcgtccattctctgcctccatggaaacagcccctagaatctgaaaggccgggataaacctaatcactgttcccaaacattgacaaatcctaacccaaccatggtccagcagttaccagtttaaacaaaaaaacctcagatgagtgttgggtgaatctgtcatctggtaccctccttggttgataactgtcttgatacttttcattctttgtaagaggccaaatcgtctaaggacgttgctgaacaagcgtgtgaaatcatttcagatcaaggataagccagtgtgtacatatgttcattttaatctctgggagattatttttccatccagggtgccatcagtaatcatgccactactcaccagtgttgttcgccaacacccacccccacacacaccaacattttgctgcctaccttgttatccttctcaagaagctgaagtgtacgccctctccccttttgtgcttatttatttaataggctgcagtgtcgcttatgaaagtacgatgtacagtaacttaatggaagtgctgactctagcatcagcctctaccgattgattttcctcccttctctagccctggatgtccacttagggataaaaagaatatggttttggttcccatttctagttcacgttgaatgacaggcctggagctgtagaatcaggaaacccggatgcctaacagctcaaagatgttttgttaatagaaggattttaatacgttttgcaaatgcatcatgcaatgaattttgcatgtttataataaaccttaataacaagtgaatctatattattgatataatcgtatcaagtataaagagagtattataataattttataagacacaattgtgctctatttgtgcaggttcttgtttctaatcctcttttctaattaagttttagctgaatcccttgcttctgtgctttccctccctgcacatgggcactgtatcagatagattactttttaaatgtagataaaatttcaaaaatgaatggctagtttacgtgatagattaggctcttactacatatgtgtgtgtatatatatgtatttgattctacctgcaaacaaatttttattggtgaggactatttttgagctgacactccctcttagtttcttcatgtcacctttcg

SEQ ID NO: 1482 - protein, 672 aa, Homo sapiens
MADVFPGNDSTASQDVANRFARKGALRQKNVHEVKDHKFIARFFKQPTFCSHCTDFIWGFGKQGFQCQVCCFVVHKRCHEFVTFSCPGADKGPDTDDPRSKHKFKIHTYGSPTFCDHCGSLLYGLIHQGMKCDTCDMNVHKQCVINVPSLCGMDHTEKRGRIYLKAEVADEKLHVTVRDAKNLIPMDPNGLSDPYVKLKLIPDPKNESKQKTKTIRSTLNPQWNESFTFKLKPSDKDRRLSVEIWDWDRTTRNDFMGSLSFGVSELMKMPASGWYKLLNQEEGEYYNVPIPEGDEEGNMELRQKFEKAKLGPAGNKVISPSEDRKQPSNNLDRVKLTDFNFLMVLGKGSFGKVMLADRKGTEELYAIKILKKDVVIQDDDVECTMVEKRVLALLDKPPFLTQLHSCFQTVDRLYFVMEYVNGGDLMYHIQQVGKFKEPQAVFYAAEISIGLFFLHKRGIIYRDLKLDNVMLDSEGHIKIADFGMCKEHMMDGVTTRTFCGTPDYIAPEIIAYQPYGKSVDWWAYGVLLYEMLAGQPPFDGEDEDELFQSIMEHNVSYPKSLSKEAVSICKGLMTKHPAKRLGCGPEGERDVREHAFFRRIDWEKLENREIQPPFKPKVCGKGAENFDKFFTRGQPVLTPPDQLVIANIDQSDFEGFSYVNPQFVHPILQSAV

SEQ ID NO: 1483 - DNA, 26314 bp, Mus musculus
cacccccagccgtgagtggggcttgtgggataggtagggactcaggtgggaccagcactgtggttggccagcctgaagcccagctctgccctgcagaaagcactgtgctctgggctggagcgtcctcagcctcttcacaggcttctttgcaccatcgaccacgctgatgccctatgtgaccaagttcctgcaggattccagccccagtgaaggtgcctgggatgggaagagggatgtccagggttgagaatgccctgccccacaaagggcttggacacacccatgacctccatcattctggctctctgcagagttggccaggaggagccaggagaacctccagcgcacagttaaatatgggggacgccagcagctgccgttacctggtgaaatgaatgcttttctggtactaggagtggacagatgggcctttcaggactctcctataatggggtggggtggtggtgctgacaggggaacagggacctctgattgctgaagactaaccttacaacttacccaacagaaagggcaagcagttcgtttgcttctaattcacctgcctgggggtgtggactacaggacgaattcacagacattcacagtgagtgggggctaccagggaaaggggcttcctgcctatgctctgggctccagtctccatcatcatggcctgtccatgcgcccaggtggcaggggaagtgctagaggagctgtgtggacagatgggcatcacagacttggaagaagtgcaggaatttgccctctttctcatcaaaggagaaggtgagcccaggggccgggatagccttacctgcccagaccactgtcaatgccacagaaacgcagattctgtgctgtgtctgtggacagtgctggcatgggtcccctatacaggtgagctggttcggccgctgtcaccccatgagtacatcaacaatgtggtgacggaccaggacatgagccttcacagccgacggcttggttgggagactccactgcattttgatcactccacctacacggaaacccactatggccaggtcagacccccctgcccggaaactgctgtgcagtgccagtctgggcaacctttagactcccctctctacaatgacgctctgtgacaagagaagccaccagctgctggggaggttgtgacacagacctcccccccaggtgcttcgggactacctgcaagggaagctgatagtcagcacccaggcagaggctctacttgcccagcttgctgccttccaacacttcgacaaaaccggaacttctagtcctccatcagagtgagtggacccagctcagcccctcccccacacctaaaggtggctcctgcctacccccttcagagccaagaccccttctctcagcctatcccgaccctgaccagactgacccggagtagaaatacctctcttcctgcccctccccaacgtgctcctgaacaaggccccagggtcattatccggaataggtgccaggcattatctggcactgcatgctccaccccgcaccaggtggtccatgcccacaggccgaaatgaccctggctctgtaccttaggcaagagctgctgtcttatattcccaagccactgcaatggcaggtgaacacagccaacataaagagcttggtgacccaggagctgaggcagatgcaagggtacagcaagcagagagcacagattggctttataggtaggtctgcatcaagatctatgtatcaagggcctgctgcctgtgatggtcaaggtccaggaggggaggggtggaggtgggaaggcgaggaggcctctatcttgcatggtaaagtggggtaggtcccagagatcagcagccgagacccttgccctggtctctacctgcagagagcacagcgcagctgcccctctttggctacactgtgtacgtagtgctgagagtgagtaagctggccctccctggaccaggcctcctggggctgaaccgtcagcacctcgtcctcatggaccccagctctcaggtaggcagaggcctgttcttgtgctggctggaaccccgtcattcctcatacagttcattgctaacccctccacccggggaaccaatctccggtctgtttgctgccccaggaactctgctgctctgtcatgctaaaagacctgaagcagctccacctgctgagcccactgcaggaggacgggccccctggcctagaactcaactatggctctgttgacaacccccagaccatctggttggagttgccacaggtgagtggccaagcctgaggcccccaggaaggaagagtgtgtattcactgaggtggtgggggtggagctacactgagccctgtctgccccgcaggcccaggagctgcagcacaccatcatcttcctgctgggcagcatgtccactcagtggccaggtctcctctgaggagtggagataaggcagcggtctctcactgggcagtctgccttagtcctgctctgaatccgctgcacaaccccccaccccacgtggaggccaaaaggcaaagttgtgtcacctgggagaataggcagacacatcccctctggggtggactgcaacaggagttggggcatttgctggctagccccagggaaaatgcccacccagctcgaaagcggcacaagtaaaacacccaagaaaagattgtgtgtgagcatgtgtctccaccggaggactttattctcgcaaatggctcacttgtgcctggccttcccgaccagcagagctcagggcttggagaacggctgcttctctcccagagagctctgctagaacaaggcctactgcctggcatctcctggaagagggcagtggaggactggaatgggcatcaccctgatagagaacttaggtacaagacaggaggcccattggttctcccagcccacccccacctggcagcggccatattatctggaccttctcatctagggacctggataggaaggcaggagaagcggggtttaaatgggagggtggtctgacctctgaccttccacttcatttgggtgtctagtaacacctccaaagtgaggtttgggcatgggaagaaagaccctgagaaagctggtgcctgtggcaaggagggctgcccagccagctgcactcatcgctgtgggccacgcaggctgtgccagtcagcttcactctcacagcgggcacgattgtggaagaactgcttgatgaggctctgggcctcttccttcactgcagaagggtaggggacacaggagaaggtaaggacccgtgtctgggcagcatcccctccctctgcacagtgccctctggccctggcccagcatcctcaccactccttccaggagagagctgctgagccagcaaatgtgagaggtggcgggcaaagcccttaaacaggtcctggagacaaagggaaaagaggagccgcagttacttgccaccacgggcaaggcaggtctagagtgggcagcagctgctctaccttacttcattcaggggttcacagtcctcgccagcccaacctcccctgcactgacccgagtattccaggcctactcaccctaccttggatataaacctgccctccttgtagaagggggtcaggtgcctgaccacaatgtctgcggcctccctcagggaggtgccagatgctgagagctggcagggttcttgagccactttgttttcagtgctgcgatcactggccaaggtactgtccttggcctcagccaagatggaggacttggttgaggggcgaagcctcttttgagcccttctctctgggttgccctgtagaaggccacagcacatggggttacttttggggtcccctttactggcgctgtcccctcttcttgaaggaagcctacaccttagcaccatgtgcctttctccagcccgcccacctgctgctggagtatgagaagtgattttccccgaacccttgaccagggcagggcagctccctgcctccccgccagtctcctctttcccctaagctcccagccctacagtacctgctgtggtctgggccgcttctctgcctgggtttcctttagagggctaggctgaccttcagggaagctctggtctctgagtgagcaggtgctagccggaggggaaaaggcaccagaagtctgagtctagccatgctctcaacccaggcacccagcagggcccactgtggaatgggcttcaagcttcacaggcccaagtggcacaggggtcagatgctgccataagaactgtgaggattccctgacacccaaactcttaccttggcctctccctgggaccctcagtctgaaatacagcaaccaaatgtccctgagctccaacctcttgtgtgcacttccctgggacatccccacaggaggggctggcatcttctgatcttggaactgaagcagggagaggtggagattctgtcctctgacagaggaatcgagtgatattctgggaatccttgcgggctgctgtggctaggagctgttgtttcttgctggctctagctttggcactgccctgggaagaccctttcgtcttcttctcaggcgaggggtccccacaattaacactgcttcctagagccttttcttggtacccagggtggggcttgctcctgtcttcatcttgaaggtcacagacccagcctgggggctcctgtccaccctctagcatagcctctggggcttgcttctgggagtgagacttccccaacagttctgtggctgtctggaatgagcaggggcctttggagaagccagctcctactctcttgggtttgagctgtgaggagaaagaagaagtcacaaggcttagaaccccagacctccttgagggcagctgtggctgtggtgagaggttctcagtaatgtgagaagctgaacaaggcacactggggaccaggctgatgggagaagagggccgactggcagatgacacacaggaggcagagcaccgctactcaatgaccctttctgacatctgggagaggagaagtctgtcccactagagggcagtggagtcttccctgaacctaggctagtgggtccctgctgctcaccgagtacacatgtgaggttggcgggatgtcatagtcactgggctccgagaactcagctgcggccccacagctcttggtgccgctttccatgtcatagagctgaccatccttggaggctttgtggatctcggccacctaaagaggaacaggcagggagaccatggcactcacaagctactgcttaaccctatcccgaccctccaatcctgccctgcttatcagatgcggggtgtgtgtgtgtgttgggggggcctgagttcccactgggatggccacacctccagtcagcagatgagctttactggtgtcagtggctccagggccagcaggctggcagatggcctctgagtatgaagaggccaccgtgccttatcctaatcccatgagcgcgtactacctgccttgcacccttggcttaccttcttcaggacactggccttgtacagattgaccatcttggcattccggaatgtctcatgctccagttccacagccttggcctgcaggtcagctctgtgggaagaaacaagcacaggagagcaggcggggctcgtgaggatgggcacatggactcggctgagaatcctctaggagccctgcggcttactgtctgtcctttagcagcctctgatgcacacccagtagggctgtaaggagtgggacccatgggacaccactgcagaggcatcctctggaggagaggaggcctctccctctctccctccctcagaggacgccttgctccctgccctggtgacctcggcacgctcacccatgagtggagcctgcagcctgatggttactgatcagagcctcctccagaagtcgcaggcagtgctcacgggcctatgagagtgaagtcatggtcaccccccctcagcggcagggaggggccctgagggcaagtgaagagctgcccctctcttaccttcactgtgagcttcgggatcttcctgcttgaagcctctctcaggggacagtcttcatctgagaaaagggaggggaaggctctccatctgagcagctcctggaagccttaccgagccccccacggtctacccccaggcacaacacccaagcccccggagcatttctgcactaacctgggggcgtgaattcttctatcttgggctctttgccctgaaagatagtcagcaggagggacatgagacatcctatcctgctgcaaggctggagaagggactgagaggtggtactcaggggaccatccaaaccctgcatgggccactgtgctgttttttgttttttgggggggcagtgcatttcagacagagttctgctatgtagtcagtctctggccttgtactccagcctctgcctcctaagtgctaggactggagtcatgtgtcaccacgctggcttaggctttttgttaacttgatagaaactagagtcgtctgggaagacggatcctcagctgaggaactgcctcccggcagactggtctgtggggacattttcctgatggacgtgtaagggcccaggttactatgggctgtggtaagtggtcctggttgtagaggacagcaaactgagcaagggaacagcactcttccacggtctctgcctcaattctgcctccaggtccctgctggagctcctgccccgacttcccctgatgctgcactgtgatgtggaagtgtcaagcaaataaaccctctccttcccatgtcgcttttggtcacacatggtgttttctcatagcaatagtaaccaaatagagccactgagcccccatcaaggcctctgccccctttaccttgcgcaggctcatctgtttctgatagaaaagattccattcccgcttgtgggcctcatctctgccctcatcaccgctacctccagaaccttcatcatacctaaaggacaggctaggtgagagcagccatgcaggggctctgtccttcccgacctgacgggacagtgatgtgctggccccagggagatcatgtgtcgcactgcaggaaggccacctttggcctggctagtacagtggaatgactatgcgtttgatggcttcttacctgctgaagccaccatagcccctgcggcctccctcatacagctcaggatcgaagccattcccctgtgagggcccgatgcaggtcttgctccagctgctgctgcgctccagggcatccagcttcttcgttatggctgcaggattctggcagtagtcacagcctttggcgcaggcggggggtgcatccccaaagtacttagcaatggcagcatggcggcacctagaacaggcagtgagtgccgaggggctgaggggctgaggtggctagtgttggctcatcctgtctccaagcactgagtcactcactatccagcaccacactccatatctttccaaagccttttttggtttattttatgtgtatcaggaggtcaggagagtgtcagatcacctggaacttgttatggatggttgtgagccaccgtgaggtgctgagaactgaacccaggggcctctgtgaataccgtctatgctctcaacctctgagcatcccccagtctctgtcctgtacccttttatccacagggcgtgggaagcatcatctggtgctgcccatggccgagccggggccagggaggtgaagcagtttccctacaggtctgtaacatatgagcctcagtctgtttggttacctgtaagctctagggccctgctcttccctctgcccagggaccaggaatgccctggagagtcaggctctgccaccaaggcaacatcaggtaggcattttactgtgaatgccacagcctctctactgctgtggggcagtgttacagtggagcacaacggtgctccatcgggctgtgagcactgatgagatgttctacaagtgttcctcaccgtggggaaggaggagaggacaggagagcccagcctgtctttagtacttgttatttagagacagggtctcactctgtagccagggctggcccagagcttactgagtactcatcacagtagactgggatggcctcagaactcagaaagccgcctctgcaaccatgcctagtctttttttgtttgtttttaagatagggtctcactacagctcagggtggccttgaactcatgagcttcctgcttcagattcctgagttctgggtctgtaggcatgagctcccacaaacagttttcatgggtatcttgatcttccctgagggaattaggcttcccctggcgcccaccatgagctttttgccctaggctgaaggctgtacctagcatagctcctggaacagatgattctcaacctgtgggtctcaagccttctggtgcttgaaagaccgttcatagggtttacctaagactatccaccaaaaaacatatattacaatttataactagcaaaattccagtaataaagaaggaactaaaaggatgttatggttgggggtcgccagagcatgaggaaggctgagagtcactgtgctagaggcacacaatgctgagagcggccatcatgcctagtcactcgtgagcccactcaccagggagatccagcctcactagagcctcactctcagcctctaactccagatgttcccctgcggataaccacttcctgcccaagctggtggcaggaagcccacctggtgcaggaggccagtctcttttcggatccccaggctgaggccctgggagaggccactgttctatcagggtccttacagtcatctctagtgccagaaatgtggtacagggttgggaaccagaagagacagcgcgaggcagggcagtttgagtgcccaggcttaagattagccggcactaacagctttggaacagagggttttcttagtctgaatactgcttgcggatctgaccccacacagcaggctactgtaaggaaagcaaattgcaatgccaccttctaaagaagtagggtccctccagcaaagtgaagaacagccctaaaactgcatagaagtggcaggaagacagctgagacagccactggggggcgctcttgcagccagctcccactaacactgaatatacacgacaaatgttccctctgcctgtacagtggtggcctgtcctgtctctgagaagctttggcatctaggcactgtgaccatatggttgtctacaccctgccccaagccctggctcactggggttttgtgctcagattcaaagggctccattgactgcagagctgaggtcagtcctccccctgcagcctggtctgctggtggcaagaccgacaaacgttaatgggccaacagagctgtcatgcagacagctgagcagaacgagaccagcagtgacctttctcttagaaggacccaaggcccctcactaaaacaagcaggctacttttctttctttctttttcttatttacttattttttgttttttcgagacagggtttctctgtgtagccgtggctgtcctggaactcactctgtagaccaggctagcctcaaactcagaaatttacctgcctctgcctccaaagtgctggaattaaaggtgtggactaccatgtccggcgcagactacttttaaagtatctaggatcctcatcttccccccagatgcccctgggtagatggcagagtaccacaccagagggctgcttgaaagcttgctgacgtgcttgggtgatcctgtagcccggttttctttctggcagagggcagagagagcagccagagtgtggcccaagagacagaccagggtggtcagggacacaagccaaaaaggccatccagagggtgctggggcacccaagagcgagtcactccaccctcttcctccggcaacctcagacggagccccccggggttatttccacagggaaccacagccaaccacttctgtcattagcccaaccccagccctccgcctacagcctacagcctggctcaaaggcaggaggagggcagaacaggaggaagaataagagagggagccgtctggggatccagagagcagagtggacctctaggcagggaaaggcatagggcgtgaagggcaagtcaagctcaggggagggctccctgggttcctcctcacaactgtaatttgacacctagatctccaggacaaccaacaacaaaaaaagctgaagcgatgaggcgctgaagctggacagcagctggctgtcagcaaccgggagcaagcaccaggaggtgcccgagtgagaagcagccgcctaggcaggaaagtggcagcgctggtgaagaagtcaaaggtggtggccaaaggacttccaggaggtacatagaggctctgtactgggacacctcttcgtggctccccactatctgagctcccaggtaagagacactggctagaggtgacaggatcgggaaaggagggcagccagggtctcgtatcgagaggagtcacagcttagcatgagctcggagaggaacgtcttgggggatatattaggccactctcctatgggaatttagtcacctcctctgtgtgtatacctgagtgctcgtcccctgggacctggtactagagaagggggatgtactgctactcggtgtgtggcacaggggctgggggctgctggacacatccatttaaaccttttctattcagtgagtttaggatatggcccccaatcttgctgagcctccatttccgaaaggattagggctgagccctccctggttctcaagaaggctcaggacaaggtgtgcccagcctgctgaatggcctctggccccaggcgctggtagagccagcagcagaactgcctacttggatgctggacaagagcagcagctttcctgtcttttggagttctgacctgctcaccgctgtgtgcttccggctcaggatcatcctagggaggagtctctgcacccacttagattaccaggacccctgatcctcctttggcaatgatctctgaaaactgagccagggatatgcaccctaattcaaaccccaagtttggaaaggagtttgtgactacatgaatgagtttggaaaagaccccagagtctcttccacactaactactgtaatggttgcccccagacagctcttctcttcagtccttgtgcagggcaagcacaaccttcttgggcagggcctcacgagaggaggctgctaagcccttctgcctcctgtcctcacactggggttcaagtccccgtgagacgtcccttccaaagcaaacacactgttatccagtaagaaagaaaaacatcattcagttttggaaaccaaggggagggccgagagtctctttggctcagcagagggggtgcactctggtttgtgtgggactgggaagctaactcctgtggtaatactaacaagtgtgcaacagagggactgcactgcagctgagccacatctgggacacacaggctccagcagtccctgagctcagagggaggcccagcttctatggctgcaggagaggagctcgcttagtttctattggccaccagagcaggaagttctctccattgtctagaaaacttgggggccagggcagcagaaccaccaaggcttcaagcacccacttttgactccaaaccggagccccagcactgatggagttgctcaaacactcaacaggcacagtgggcatctctgccctgctggttaggctctgacctctcaggtctctcacatctgttggttatgtctcattcgagatgctcctcaacggacaaaaggggctgagagcccccatgactcttatcaggcacagacacgctgcttgccctcatccgtgtggggagctggagttggatgatcaagtagacaaggaggaagtagagaaactgtgggaccaagcttctgctgtctggcctacaggacacttactatatagcaagaacctccatgtcccatgccacacccaggaacactaatcggtcccccagctcggccagtttccttctctgttgtgctagctctctgatcactgcctgtggagcatccacagaaggttccaaatctgctgcacaagcggcctgggcaccagtgggcctcagtggcagccaagcctgttctccctcctggaccagagaaagctaccatttgttctaccaaacatagcattaagagagactctagttcccccaggtttggggcataaagtctggtttagaagtaattggacaaacctgggactgatcgttttggaaacacaaaattaccagtagctttgcttggcttcacccaaacctagggtgtatccagtcaatggggcccagctccagggctccctctccccctgaccacggctggggagcaaggttatattgggcaccgagtgtctgttggctctgctttaaatagcccactgggaagatgcctggagacctgctggaatgtgcctctttcctctttggagaacaagacccctttgctcccccctctgagatgtgcttgttatgttgggtcagagcttaaaataacaaaacactaactgccaagcaaagagggttcctcttcagccctttgagggcagagagccatactctgcagccccgcttctgctggtaacacagacaagagctaacgccccaggtcacatcccaaggctggcataggtggccacgttccaccgagcttccagtggggatgactatagaagccctgggcacaaagttatgaggctgctcacaataggtggtccacgttcttacagagaagagctcaggtgcccggggcacaggtctgcagttctccaactccacaagccatgcataatgcagagaggagtggggaaaggcacaagggaaaacacgagagaagctgggagtaactgaccaacaaagcctgactgccctgcatagcaggcccagccccagcctcctgccttcttcctgctctgggaattgacactgctagacccttcagctaggcctagggtcccaaccccaccaaccctgacagagctggtgcttcttccccccctaaccgccatttctctttaggtcttagggtgtggcacacaagtgagaaagctctcctgaccaccaactcctgcctgcttctgcttttaaggagtgtctccattgggcttgtgaggcaatgtgggcacagtgccagtcagactgaacaagccagaccaaacatagatgaagagggagggtaagaaacaacagccctggttctgaaccttatgcacactatttctgggggggggggggggcaggagtgttacagaggtcccagggtaggagggcgaatacatcactgtccttctgcaagcatgttccaactggctaggggcagcatctcctttgttctcaccagaaggaacggtcttaggttcataacagcaggacacacagatctgtgcctttagtgacaacacatgcagttctcataaagcctggtgtgccccactctggtggtgatgaactgataaaaaccgatgccccaggcccacaaaaggcaggcggtattgactgtgctcagcccatgggcttccaaatagctacagcctggttcttgcacaaagtcaggaaggcctctatcaagagcatatgggcagcaggaggggcactggctaggcccatccttgtctttcctggcacttgtcaggccccacccagagagagttccaggagccaggcccctccctagggcttctcctctccactacagcagagataaagagcctgtccatgcacaggagggggaggggttgagacagcaggatcgtggcagttctacgagggcagaagttagagggtaccacatgactggagtgtagctccacggcacagtatttgcctggtttaagaaaggtcccagagtccattccccagtagcacgaaaaggaaaactaaacacacaacaaactcagagaaagcaccatgtgctttacagaaaggaagtccaaatgtttggcagctgtggtccagttcctgaagaactgttagggaagaagggcagcagtcggggcctactcgactaaggagacgtggaggaggtccgaaagggcctggccttctacactgggcagctacaggcaaccaggcctctcactttcagaggctgcacaacacacaggcagagagcacacgtgtaggatgacccaatcacatgaccttcagagtagttttagaccagctatgtgccaggcaggagtaatgggagtgaccagtgtcacacatcacagcagaaggaaccacctgcttggttgagaccagggccaaggtagcaatcattgaagactggtcacctgcctccatccctcaggaagaaccagtttggacacactggcacaaggttgtccctgttctcactcacaggacagatgtaaggggaggaggcacaccttcaaagcaaactctgctgagaactttgcctaggctctctccaggagccctggaccgtcaccactctacacacaggtcttttctggttacaactgaacaggtccaggccaggaggggaagagttggttgagccagtcctagaacttccgctcccatctagataaatgaggcctccaggggataccgcgtggtcccttcttgcttacacgacagtaatatgagtgaagacactggcctgggaggagaaggggggtttcttggggactcagcttcatatcattcaagcacacaacccctcactctacagctgattccagctagagtcctcatgaacctgttcttggagtctgattctcctcctacacagaatcctaagacctgtcttgttccccggagggcatctaggggaggcacctgaaaaacatcagaggcgggccaggaagctgtgtcagctgaggcaccccagcaaaacctggtgctgctgtctcaagacaaaggaatgcaacagtataatctgaccatctgatgctcagaaccttacctgacagccccttagaggctctctccaggtcacaattatcacaaggttcccttgccggggcggctccaggcaggtgtgggctgagggctgccactgagcagacttccatgactccctgtctcccgctgcgctgcctcggatgcacccgtggtacagggctgaaacagacaaacctgttctgcaggctatggtgggagaggttgttcactggagctacctcccagccagcgagcagggactctaggcttctcactgtctctgttgttgcagaccggcaggagccctaccaccatggcagccacagactttgtgggggagattcgctctgtgggagagaggctgctgctgaaactgcaacaactcccccaggcggagcccgtggagctcgtggctttctccatcatcgttcttttcacaggcaagtggggcatctgtcctgacccttagctctgtcccttagtgtcccaatacctgggagaccaaccatggtgccagctggaaggctggcgagtctccttcaaagaagtaggaaaagcagtgtcccagaggaagctaagggatttgccatatcctctgacactgcctaagttgctaggcagtgctggggactggaaaccaccaggtgtcagccatgaactgaaaggagtcaaaaagagtcacgaggtagtggagcgagacaacaggcctctcagcctctccagtccttcaggggtggggagaagggagggtctctagaaggagggtggccatcacttctgtccctggcctttcagctctgggcctttctctcccttcagctactgtcctggtgctggggctgatagcctgcagctgctgctgtgctcactgctgctgctctgagagcagacagcggaagatcccggtgcggcccagaaaacccagatgagggacaacagcgagctgcctggagagaagctggacaagaaagagccttccaggactgtaacccaggctattaccatggccactttactcctccagacaaaggttacctggccccagttgtggcatttcccaggtgacaggaaagacatctcgagtcttatcaaggaaacaagtgttgccccatctgccggggacacagggctctgttggagctgatggtttcacactcagaccaccacctggggcatctgctaagctgacccttttaagggtcccgcacttcaatagggaccagctcatgcttgtcaggagctggctcctggggctctgctgacctatgccaaagagaagtaagctagtgagggactctgtgcactttatcggactccaggcctcctgctgagggggaggaacatggcagcattctggttaaaatttgtctgcttatttccaagtaaacagtttttggttatgtgtttatgaggtttggctgggctctgtgtatcggaagggcagtgccagaattccaggggcatggctgttgactgttctttccgggctactgctctttgtgtgaccatgaaagctggaaaatcacacaggaggaatgccaccagggcatcaaggccatggcaccagaggagagccacagcaacattcctgttttgcatcctctctcacatgctggcttccagacccctactctgttgagtgatggaggctgttgccccgggacaggtggtaggcccaggaatgcctccttacatttccgctgtcctaactctgtctgtatacctcacactagcagcctcaggtcactggatcctcccacatttctgcagttgaagaaaggttaggctcttagtactgtctttcacacccaccccttgatgttttggtcctgttcctatttgtgtgctgtctggactctgctcacacaccctcagctgacacctgccagcttcgtgacccaatcctcttaagctaggcttccttctggtgagatgattaagcgtggcacttgcttcctgggatatccagcaagacagcccaagtctaacagtgccgggcacactctagaactccgtaatcatgaactgtgctcacctgccctcctaagcaggcctgaccagagcaccagggcccattttaaagaacagtgctgccgagatgctgtcatgccgcctccccctctcccaccagcaggtttctttcttccagatacacagctacaaaactcaacgtggaggagggggacagacatgtgagtctccatacatgtcaacaggaccaggactgggctctctagccatcaaaggctctaattactcactctgacccctcagtctctgcagcacacgttctgcttgcttgggagcagagcccacctaccttgaagacaggtcacagatagggaaagtcagtccctgccacctctagctggcaatccaaaccatacaggcagccagttctcactggctggtctgactatctgctgtctacagagttggctgacaggtttgggttcttggagaaccagaaatagtttccaaacaaagacaagaaatctaagactccacctgtccttggctcctaaaattgggattcagagttgaacaagcccttactttaatcccagcatttggaggtagaggcaggtgggcttatgtcagctccaattggccagggctatataagaccttttcaaaaaacaaaaactcaggagttggggatttagttcagtggcagagtgctctgaaaaaacacaaacacaaactaccactgaatgatgatggtaaagaaacgaaaatgcatcgcgctgcttttaaaccctctctgtggtgctgcaaatgaagccctgaagactgtgagaactctcggcaagtggtcttccactgagccacacccccattcatgaagcctacattagcctctcaaatgttaggattacaggaaatatgccaggttgtcttgagtttttgctttgttccaattgattgattgattgattttccagataggatttctgtgtatatagccctatctgtccccggctaccccaaaactcactccatagaccaggctggtctcagactcagagatctgcctgcctctacctcctgagtgctgggactaaagaaaggtgtgtgctaccactgcaacccctgctctttttttttttttttttttcatctggttttttgagacagagtttctctgtatagccctggctgtcctagaactcacttttgtagaccaggctggcctcgaactcagaaacccacctgcctctgcctcccgattgctgggattaaaggtgtgcgccaccacgcccggcgtaaccccctgcttttttttattttaagggactggaaactatattcattacactggtgttttgcctacatgtacatctgagtgagggtgttggatcccctgggactgaacttacagatagttgtcaagtatcatgtaggtgctgggaactgaacctgggtcctctggaagaacagtcagtgctcttaactgctgagccatctctccagaccttgttgttgtttagacaatctcactaagtagccctggatggaacttgagaagcaaaatcccttggcacctaactcctggctgtcctctgcctctgtggtgctgggattacaggcattctccacaagcctgctcctgtcttgagcattttgatacagatacgttcatttaactatcatgatgcttcaggcctatagatgccattattgctccattgacagacagggaagttgagtctgagtggcacgagataatttgagcagcaagctgaaaagtggcaaagccggcctgcctggctccagtgcacctgctcatcacacctagggctcgaggcctctgggacacaagacagaagattctgactccattatctctattaaccaaccctacattcaaacccccacactcaaactctgcccaagactgcttctgtgtgagtgagtgagattccagcacccgaggaccagtactgggttcaaccaggcatcagaagaaagtcccagaaacaggggagggtattggaaaccccaaattcttcactcccagtactgttggctggaggtccctggaagccctcagttcaggggtagcagcccagttccttccagactcttctttcagcagatttcattagcatcatgaatagccttcctgtagggtggctaagactgaagcctctcctttgctagaaaacattctagttcccagtctagctgcagagcagtgggtaccatggaccaccctggacatagcacaagaagccagttctcttgcacattcctgccctgtgctaggacagcccatcctttaagataaccaacagcagcctgacaaattcaggggtggacagacttcacctaactgtagaggaggcagaggtcttccacggtaggagacagagacagttgctgctgacctgggttgtcagaagattgctggtgaccacagaagaggcacacaacagactacatcaaacctagggaaggtcctaactgtcactgtcctatgccattcaagagcaagcctcttcagtgcacagtggtctcaccagcttccccatggcctgccttctcacacagcctctgtcctagcagtgtctgttctcagttcctccgcagcatgagatctgcacatttcattgcctgaattttatgccttattgcaaaaccaagacaagaaccatggcagcagcacctagcagagcagacaaattctgtgaaatattaacattttcaaagcaatttataacaaaaaccatcatactaacacaaatgagtattacaaatttcatatcataaaatatgtgcacagattaattttgtcctagaaatattctcctcttctttgggccctggttcatgccatggaatgctgtccctacctcgtttctttttaaaatttgtttttatatgtatctttgcctacattcatgtaagcatctatttcctcagttactgagacaatagatctacttgggtacagcagttattcaaaactagacaagggctggagagatggctcagtggggaagagcactgactgctcttttgaaggatccaggttcaattcccagcacccataggacagctcacaactgtaacattagttccaaggaatacaacatcctcacagacatacatgcaggcaaagcacccatgcacatacaatagaaatagagtattaaaaaggctagaccaagcagctctcctatgaatgacacatttctttccacagacctgattttgttgctgttgttctgagacaaggtctcagtagatatctctggctgacatgccattcactctgtagaccaggctggcctcacactcacacacctgcctctgcctcctagatgctggaattaaaggtgtgagctaccacacctagctcggattcattttgtatttttaatgattttttttttttttttttttttggttttttcgagacagggtttctctgtatagccctggctgtcctggaactcactctgtagaccaggctggcctcgaactcagaaatccgcctgcctctgcctcccgagtgctgggattaaaggcgtgcgccaccacgcccggctcttttaatgatttattaatcttttatatatatatgtatgaatgcttggtcctttcagaggccagacaaaggtgttgggtctcctgaataattataggaagctgtggccacctggtgtgagcgctgagccctgaaccagggtcttttgaaatgcaacaagtgcccctagcattgaactgtcctccagcccatgtacctctgatgtgggcacaggtgcctctgtgggtgggctagtccttctgaggaggggctgctgtctagctctgctcgagccttttccttgtagttttggttttattagagcaagagtttgaatacacctgcaaaagaaactgagtagaaaatgtcaccagctgggtgaggtggcgcacgcctttaatcccagcactcgggaggcagaggcaggcggatttctgagttcgagaccagcctggtctacagagtgagttccaggacagccagggctatacagagaaaccctgtctcgaaaaaaaccaaaccaaaccaaaccaaaccaaaaaaaaaaaaaaaaaaaaaaaaaaaaaaaaggagagaaaagaaaagaaaagaaagaaacaaagaaaatgtcactagagaggggccagcaagatggctcagtgggtaaaggtactggccaccaaaccttaagacctgagttcaatttctggaacctacttccacaagttgtccactactccttctccatacacacagaggccatggcatacgtgtgtgtgtgtgtgtgtgtgtgtgtgtgtgtatgagcacacgcacacacgccacaaaatgtataaaaaaatttaatgtcacgagttttacaaaatgtgccaaagtttagttatgtttctattgtttcgatgggactatggagtgatagcaaagtggtcacataggtattaatagagacaacagctgtcatctgctctaagagctgactatacagctggctccaaactccaactgtaccagctgcacaaccgaagttgcttaaccacactgtctgtccttgctgtaaaactggagttgtggttgtcattactgcttcatctgttgataccatgtcacagtcaacgttgttatcatagaaacaagcgcagctgctatacaccagtctgggaacaaacaactgactcttgataagaacctcatttaactgatgggcacaaaccataccagggtgtgccagagtcccgcctgctggctgtgtgcatctagcaggccaggaagtcagtgagttttacacaaggaaatggcaggcgacaacgctttcctgagcttgttcctcacctgtcaccactccaggttagaccccagaggattggatgacagataccctggcatcccagaaactgttattcagtgagcatttcccaaactctgacggcaggattgatgatgcactagaacacaagcccttcagaggcaaaggcccacctctctgatcttacaacgggctatggcaggcccacatgcctaagctctgaaaggagtcaacagtggccgccaagttccaagcaaggccagtgtaattagtccccttccaaggcgtgtgtgtgcacgtgcatgcatgtgtgtatgtgtgtgtgtgttgtgtggtcgccccctctccagcttcttctctctctctctaaccacagaaccagcagaggccatgccagaggcaggtactgcggggaaaggctccgtgtgataagctctcctactcttacccagaaacctgttccaggcagttcctgccagaactgcagttaatcattcacccaaaccgcaggaaggaaggaaagagtgctcccctacgagctctgagaagagtgctcccctacgagctctgagaagagtgctcccctacgagctctgagaagagtgctcccctacgagctctgagaagagtgctcccctatgagctctgagaagagtgctcccggggagatctgagagctctgaatggctctaaggcccagctctcatcagtgaggctgacaggcggcctggggcacagacccactctctcttctcaccctaactcaggctgacctctctcagggacttaaaactcaactcctccaatgccatcacagaagggtagaatcctaatggagggaatgagggagggagtggcagttgccaggcaaccagtctagcccacccttgtttgctctggtggtggcagcaaaggtgtggtcagagtatttggcaactccctgggctgccaacagcagtttctctgagttggggcaaagctgtggtcacctggaagcctcttccacccaggaaccctgaagtctgaggccggaaggacagcctgacttgctttgtcctcagaagattcaagactattaacagaaaaccaggtaatgacatctttcttcttctcccactccccaaacggctgcagccccacactcaccagctccacttccgtaatatggcaaggcctcctgctcccagctgcatccaaggacactcagccatgctttcttcctatccaccaccaagacatttttaagatttatgtgtgtgctgttcttacgtatgcatttccacacaggcactcctggtattttcagaggctggagatggtgtcaggcgccctggaactggctttgtggaagactgtgagctgagcagccagggctctgagatagggttttctgttctcagctggcctggatccctgggctcaagtaggaattcagccttctgtggagctgagacttaagtcaccatcacccagctaggcttatagaccaagctctcaaaatgcctcccaaacatctgggaattgggacaataagaataggagacctacaggtgtacactttaggttctagctaggaaggcctcagggacaggagaaatatcaggctcatagcagagtttttcaagaatgagccagagactctagaggtagccctcagcagcttctaagcaggaaatcccatttcccactttttttttttttttttggttttttttgagacagggtttctctgtgtagccctggctgtcctggaactcacgctgtagaccaggctggtctcgaactcagaaattcacctgcctctgcctcccaagtgctgggattaaaggcgtgtaaccaccacacccggctatttcccactttttgatattagagactttgaatccaaagactcatcatcccgcagggttggctagctagctgtgtcgagctgtccagaaggtgtcatggatagcaccactgggcacaaggccttcagagctctctgcactcagggcctcttgtctcctctcttccagatttccatgggccaaatggtaccaccaaggagcatccagaatgaagacttctggaagaacccgtgggatgtggggggcctgacagtgattggcttgttcacctccacgttcctgctcttcgtcttatttgctgttgtgtttgggtatgtggaaaaggctgtgtttgaagaggagtgatccgtctcctccgggtcctagaaggcagcagagagagaggggctgatctgctcagccccgaccagcagtgggcttccattccctctggctcaagaaagaatctctgggaaccattggaccttgcctaggggttggccagttagccaggtgggaaggcaggtgtggtaccatttctggctctctcaccctgcaccagctgaacactaagcacacggagaactctgctctgcctcagatgagagagagcagcagtggctaaccagaccttctgatgagagtccctgcccaagcagctattttcaagtccttgacagagaaggacacgaaatgtcaaatgaagtaaaacttccttctcagatccgttatcgtgagctcattttctacgcagacatgttcttctttatgctggcttctctagcaacctcactaaggcctacaagtcctcgagggctctgaccctgtgaacagtagactcagtcgcatgggctgtttgacacgtgccccaggctcaccacaggaccttagttcctcagctgtcgaggctttcccacacatccccctggctaggatactttgcctcctcatactctcttggcttgactacttactgcttccttgtccctcaaaatcccagtccaaacctgccttttcaaatccattctccctgactctgacaccagagactgggaaagggcattctgttactctcagaacaatactctacagggctcgggaggcggctcaccagctaaaagcactggcagctcttgcagaagaccctggtttgatccatagcacctatgtggtggcttacaactatttgtaactccagatgcaggggaactgatgcctttctatggcctctgtggacaccaggcacacatgtggtgctaagatacacactcaggcaaaacatccacatgcgaaatttaaaaaaaaaaaaaaaaactcaaccatgtactttttcttcaaagtactttcatgagaaattttatataactaattatatattaactagctatacatttcccaaggagacgagccccatcgtcggtgcccttgacagagcagtgaagacataagcacaagagtagctacactggacgatgctgagcagctaggctccctagtgcagagcccccacaagtcagttctgcccaggccagcatggaaatctcctcttgcatcttaaaatgcacacaggttacttcaatgcctaataactacaaggttaaagtcctgccatgaataggtttctttgtggctgcagctcagagaaaatggctacatggaggagacaaactaaaaaccactggctgccccccaccctcccggcctcaattggaatggacctgaataccctctctggtgatcccagcccagtgcccacatcccaccctatacatccctacaacagcttccttccagaagtgtacccacttagctgagcttaccccattggctttatccctccctgccaggtgcctgccttaaggggtgctggtgtcacccgactcagcctcaaaccagaactattcttagaaaggcaacacccttctgttgaaggggctttcttgcttcacgtgtatactgtctacacaatgaacactctctttcatgtaaaggacagaggggacagagatgccagcaaggtttacttcactggagacctgggaatccggacctccagaccctcccctgtagccatcaggatgggaggtgatgcatcacatggacttctcggccccacagaagcacagccccaattgcctaccaaggcaatgagaagacccagaagaaagaaaggcagaggccccaagttggatctgttctaaggcatggtaggttttagcactctggtctcagacaagaacctactaagattttttgcagaggagactgacagctggaacatgcggttctttcattcctcaccataaagagttctggaggaggctgaatttagtacattcatgtaccagtggccggagagggctttggtggtatggttttaaccaaggggggtgggtagctggcacagcaacccacaactttttagcatgtgatctgaccacagagaccaaattagagatgccgtttccaaaaggaattacttcagtcaatgaataggaagaagttgagcatcccagtgtgaaaccagatgagcaggacctcttcccccttcacaggagagcctaagtagaccttgtggacacgagttctatgtagttggtcattggcactcggcttcaggatgagaatatctgtggttggagtgtaagtcaatggtagagggcttgtatactatgtgcgagctcctggttcaatccttaacagcacgaaagcaggcatcccctcttcgcccaaagacgctcctcttacagaacccaaga

SEQ ID NO: 1484 - DNA, 1055 bp, Mus musculus
gggcagaacaggaggaagaataagagagggagccgtctggggatccagagagcagagtggacctctaggcagggaaaggcatagggcgtgaagggcaagtcaagctcaggggagggctccctgggttcctcctcacaactgtaatttgacacctagatctccaggacaaccaacaacaaaaaaagctgaagcgatgaggcgctgaagctggacagcagctggctgtcagcaaccgggagcaagcaccaggaggtgcccgagtgagaagcagccgcctaggcaggaaagtggcagcgctggtgaagaagtcaaaggtggtggccaaaggacttccaggaggtacatagaggctctgtactgggacacctcttcgtggctccccactatctgagctcccagaccggcaggagccctaccaccatggcagccacagactttgtgggggagattcgctctgtgggagagaggctgctgctgaaactgcaacaactcccccaggcggagcccgtggagctcgtggctttctccatcatcgttcttttcacaggcaactactgtcctggtgctggggctgatagcctgcagctgctgctgtgctcactgctgctgctctgagagcagacagcggaagatcccggtgcggcccagaaaacccagatgagggacaacagcgagctgcctggagagaagctggacaagaaagagccttccaggactgtaacccaggctattaccatggccactttactcctccagacaaaggttacctggccccagttgtggcatttcccaggtgacaggaaagacatctcgagtcttatcaaggaaacaagtgttgccccatctgccggggacacagggctctgttggagctgatggtttcacactcagaccaccacctggggctctgctgacctatgccaaagagaagtaagctagtgagggactctgtgcactttatcggactccaggcctcctgctgagggggaggaacatggcagcattctggttaaaatttgtctgcttatttccaagtaaacagtttttggttatgt

SEQ ID NO: 1485 - protein, 103 aa, Mus musculus
RSQRWWPKDFQEVHRGSVLGHLFVAPHYLSSQTGRSPTTMAATDFVGEIRSVGERLLLKLQQLPQAEPVELVAFSIIVLFTGNYCPGAGADSLQLLLCSLLLL

SEQ ID NO: 1486 - DNA, 28229 bp, Homo sapiens
acacaaaaattagctgggcgtggtggagcacacctgtagtactcggaaggttgaggcaggagaatcgctagaacccaggagggtggaggttgcagtgagccaagatggcaccactgcactccagcctgggtgacagggcaagactgtctcaaaaaaataaaaaataaatgaaaaggccgggcacggaggcccacatctgtaatcccagcactttgggaggccaaggcgggtggatcacctgaggtcaggagttcgagattaaacctggccaacgtagtgaaaccccatctctgctaaaaatacaaaagttagctgggcgtggtggcacgcgcctattaatacttgggaggctgaggcaggagaattgcttgaacctgggaagcagattgcagtgagctgagatcatgccattgcattccagcctgtgtgacagagggagacgggagcagcgaagaaagtaactgagtagccagtgcagtgatgtcttaagctgagagagacatcttgagccagccccagcccatggcctagcagggtttctccagggcttcagaccccaggctcaccgctgccatccctcaccccacctgcccttcctgtccccacagctgtgccagcaggagaagctgagggatgagatttactgccaggttatcaagcaggtcacgggacacccccggccgtgagtggggaccggtggggtggggtggcttctgggggcagctgggcactgtggcctggccagcctgaagcccgagcgctctgccctgcagggaacactgcactcgaggctggagcttcctcagccttctcacaggcttcttccccccgtcgaccaggctgatgccctacctgaccaagtttctgcaggattcaggccccagccaaggtgcccgtgggaaggggagatggaggagaggcaggggtttctaggactgggaacttggtgggcttggggagacatggccatctcataaccccaggctggcttctctgcagagctggcccggagcagccaggagcacctccagcgcacagtcaaatatggggggcgccggcggatgcccccaccgggtgaaatgaaggctttcctggtactgggggtggcggatgggcattgtgggacaccctggggtggggagtgtctcctacaggagaccactggccgactgaccctgcaacctgccttggcagaaaggacaagcgattcgcctgcttcttattcacctgccggggggtgtggattataggacgaatatccagactttcacagtgagcttgggggccaccaagggaggaggccttgggcatcagttctgggtcccccagcctccctccccctcatcacagtctgtccacatgcccaggtagcagcagaagtgcaggaggagctgtgccggcaaatgggtatcacggagcctcaggaagtgcaggaattcgccctcttcctcatcaaagagaagagtaagcttggggacggagcctcacggtggggccactcccctgcccaggggtgaggtggtttggtttctgctggggtggcagggcagggtgtgtgtggtctgagcagcagtggacctaggctccccatgcaggccagctggtgcggcccctgcagcccgccgaatacctcaacagcgtggtagtggaccaggacgtgagcctgcacagccggcggctccactgggagaccccactgcacttcgataactccacctacatcagcacccactacagccaggtcagcctgcctgcctccgagctgctgctgcagtttgagggcgcggcttcctgcctgggcgacctccaagcccctctccccacaagggtgtgggtctgtggtggctggggggtgacagtggcaaaaggaggcttgagcctctagagccaccaactgatggggggctttggaccaccgctgccctcctcaccgtgctccccgcacaggtgctgtgggactaccttcaggggaagctgccagtcagcgccaaggcagacgcgcagctcgccaggctggccgccctgcagcacctcagcaaggccaacaggaataccccctcagggtgagtggaggcacctcccgcccctaagcccctccccttctctaaggtcaaggccatttgactggtacccttcctggccctaaatggactggccaggagcagcggggcctgtggacatctgtcctctccaccccaccccgagctcctctggtgcaggaccctcacctcattcatgtgtatggatgtctagtcttgcccacaataggcactggttatttggcacgtgctgtatgcccagccctgtaccaggtggtcaggggccaaactgaccctggtcacacatcctaggcaggacctgctagcttacgtgccaaagcagctgcaacggcaggtgaacacggcctccatcaagaacctgatgggtcaggagctgagacggctggaaggacacagcccccaggaagcacagatcagcttcattggtgggtctgggactaggggaccgctgggtgggggctggaggccaagagggaaggaatgcaggtagaggggcgaggaggggtctgcgcctgccctgtccctctcagctgacctgggggaccaagcagagcaggttccagggccccagcagtcagatttcctgcctgcaccctctccacccgcagaggccatgagccagctgcccctcttcggctacaccgtctatggggtgctgcgagtgagcatgcaggccctgtccggacccactctcctggggctcaaccgccagcatctcatcctcatggaccccagctcccaggtgggcacagctcttgcctcagcactggcctagggacccttgggctgttccatcacccacaatgacccctccccggagaggagaccagccctgctctctgctgcccccagagcctgtactgccgcattgccctgaagagcctgcagcggctccacctgctaagccctctggaggagaaggggccccctggcctggaagtcaactatggctcagctgacaacccccagaccatctggtttgagctgccacaggtgagtggccaggcctctggccaccttgcgaaggtggatgtgagggccttgccccagcatggcgtgcagtgggagcccaggcccaggccgatgcccactgctccggagtgctgtgggccggggcagaggcgaggggctggctggggagccctcttgtaacaggcctttctctgggcaggcccaggagctgctatacaccactgtcttcctgatagacagcagtgcctcttgcactgagtggcccagcatcaactgagaggagtgcaggccggggagagaagaggatgaggcctcccccggcccaagtctcacccacatggtctgccttggatgctatcagatcactgttctagaacctgcctcagcacagcccagccggcccacatgcaggccatgaggcaggggctgctatcacgtcaccagcaggcaaagaaaacagccagaccctctccaggacggcctggggccaaagcgggctgcaggaactcggctggggcacctgaggttgcccagtctgagggagatgcccacccgaccccaggctccgcccaggccccacattagcacaagcccaggcatgggagaaacagctgctgaggaaataaaactccctggagaaaagggctgtgtgcacgcctgcatgccccacaacaacacaactttattcctctcccaaacatctgtcaggcctggccttcctgagcaggagctgagcaggaacagggcctggctgcctctcctctgccacagctctgacctgggcaaggctggaagctggcatcgtaatggatgggggagtgggtggaggatctgagggtcccctgggtaggttccgataccttggacaggtgggcctcatcctgacttagaactcggggaggggccactcttccttccccttcttccagcagcagctccaccaccctccaccttctgtcctcgacatgtgtcccagaaaacccagccatgaggaccgctctgagaagggtctataggctttgcaagcagaaagaaaggtgggctgacctctgacctggattcagggggtgtctggggtcatccccaaagccaagtatggttggaaaggagaaggactgagaaaagacgatggccctggcatcagcaggtgaggcccaggatgacccatgctagaatctgggggaggacgcgggccctgcccagccagcagttggtcatctctgggggccacacaggccatgccagtcagcttcgctctcgcaccgggcccggccatggaagaagtgcctgatgaggttctgggcctcttctttcactacagattcagggtgggggcatgaggaggtgagcgttagcctcctccctgtagaccaccctcccaagtgcctcctggccctggcaatgccagcgctcaccgctccttccaggagaggtcttctgagtcagcaagtgtgagaggtggcgggcaaagcctttaaacaactcctggaagggagagggagaagagaagcagagagcaggacccttggtggccgggcgcagtggctcacgcctgtaatcccagcactttgggaggccgaggcgggcggatcatgaggtcaggagatcgagaccatcctggctaacacggtgaaaccctgactctactaaaaataccaaaaattagccaggcgtggtggcgggtgcctgtagtcccagctactcgggaggctgaggcaggagaatggcgtgaacccgggaggcggaggttgcagtgagctgaaatcgcaccactgcactccagcctgggcgacagagataaaaaaaaaaaaaaaagagagcaggaccctgccctgacccccagagcaacccacggccatgacccaacggcaaggcaggccccagggaggacgggcgtggggctggccctaggcccactgtgttctggggctcaaactccctgcctcccacccccactacacccacataccccaggcatgggagaaggcagagcccactcactccccctaccttggaagcaaacttgccctccttgtagaaaggggtgaggcacttgaccacaacatttgcagcctccttcaaggagacgccaggagcggagagctggaaggggtcttgagccgtgggattcaaggtgccctgttcgctggccgagacgctgcccttgacctcagctacgacggagggcttggctgaggggcgtggcctcttctgaggctggctctctgggttctcctgagaagggccacagcagagggtcactcctgagctcccttccactggcctgctcccctcctccagaagactgggtccccgcaccagctgcctctctccagcccagcccatctgctgccaggtgtggaaagaaagctgattttccctgaccccttgagcagggcacaacagctcctggcctcgcccacagcccttctctcctccccaacagactcatccctgccggcacctgctgggatcgaggccgcttgcccttccatgtgtcctttgcaggggtgggctggacttcaggggtgccctggtctctgggcgggcaggtgctggtagagggaagagcaggcatcacagcactgggtcctggtggctccctcatcccaggaggcctaggagagcccatctcaggggtgagctctgagcttcagacgcccagtgagcaaaggggatgctgccgtgtaggttccagaagattctatgactacctgtacccttaccttggcctctccctgaggcactcctcagtctggggaggggcaggcgaatgtcccccggctccatcttcctcccctgtgtacttctctggggccatcgggggtccctgaaccccctcacaggaggggcaggcaccttctgcctctggggctgatgccagcagagctgggctttccacccttcggcagaagaagcgggcgatgctctgagaatccttgtgggccgctgtggctaggagctgctgtttcttgctagcccggcccttggcaagggaactgcccccagaggaactttttgccttcttctcaggggagggccccccatagtgagcgctgcctccagggacctcccctctgggcccagggaggggctcactcccatcctcatccaggaggccacagggccggctcgggggctcgtgctcgcctccccgctcgggctggggggcttgctccctgatccgagtcgtctccatcagttccgtggccgtctggaacgggcaggagcctttggggaaaccagctcccacccgcttgggtttgagctgtaaatgtgagcaggaggagaggaggttcagcccactaggcccccttgagggcaccgctggctggagcagtcactcacattgggacggggctctcaggagtgtgggagggaagaggcaggcaggaccctggtggggagccaggccttggcaagaggtgcacccctgagggcagaggggaagtgaagcctttcctggtcacaggtctggaggccactgggccacagctcaccgagtacacatgggaggctggtggaatgtcatactcattgggctccgggggctcagcttgggcactgcagctcttggcactgcctcccatgtcatagggctgcccatccttggaggctctgtggatatcggccacctgggcagggataggcagggaggctgtggcacccgccagctcctcctgacatgccccacctagccctccttttctactaggcactacaagtgggtttctgtggccagtggccacaggcaactgaccactgggcaagttttaggcctcccatcctcacagggttggctagaaacatgtccagccagtggagaatggagctctacccccataaactgtctctggggtgggctggggagggtgagttctgggctgcctgagcccagagagctggcagacagcttctgcctcagagtatggaggggcccctgcaacgaccctgggtccgcctgcaccaggcccaccttcttcagcacgctggccttgtagaggttggccaccttggcgttccggaatgtctcatgttccagctccacggccttggcccggaggtcagctctgtgggtgcaaggtaacaggcacaaggtatcaggtgggcctgggcttctccctgctgagctcttgcgggactccaggcctggtggggtaggccttgggcacagggattctgattagggctctctgagcaccctgtggcttactgtccctcagcagctgctggtagcacctaagttgtagccatgcctggccctggtggggttgtaggggcagtcccctggagtaggagaggtacaatctggggagaggtggcccaaacaggccagggttgacagggtcctgcagtctccaagggaacgagagcttggagtgctcctcagcccagtgatcgtggaactcactcatcagcggtacgtgttgactggcggttgctgctcagcgcctcctccagaagccgcaggcagtgctcccgtgcctggcacaggacagtgagactggtcgcatggcctcgcggctgggagagggccccggggggtggctgaggagctgcccgtctcttaccttcacagtcagcctggggatcctcctgctagaagcctctttcaggggacagttctcatctgtgggggggggggggtggtccttggtcctttcgctccaccttctgcgctctgaggtcccccacagcccggatgagaatcctccctccatgccccgggaagagcccacaagcctccaggaacatttctgtactgacctgggggtacaaattcttctatcttggggtctttgccctggaggacaacatgaaggacccatgaggcgtcctgccctgccgcaggacagtcccatccagcaccagagaaggggctgagaggtgcgagcagggggccaccaggggccccacacaggccactgagtgcctcccctcaccttgcgcagctgcatctgcttctgatagaagaggttccactcccgcttgtgggcctcatctctgccttcatccccgctgcctccagaaccttcgtcatacctagggacaggccaggcgtgagtggccctggcctgggctctgccctccccatgtgtgctgctgctagaacggcaatgtccctgatgtcctaccagctcaaggggggattgcggcatcgtgccacctctggtctggccctggcgccaagggaatgccaggcaattccagcgggttggagccctggcttctcggccccttacctgctgaagtccccgtagcccttgcggcctccctcgtacagctcggggtcaaagccgttcccctgggagggcccgatgcaggtcttgctccagctgctgctgcgctccaaggcctccagccgcctccgcacggccgtggggttctggcagtggtcgcagcctttggcgcaggcaggcagcgcatccccgaagtacttggcaatggcggcatggcggcacctggagcaggcagcaccgcagaggtgaggggcggagagcccagtcggccagcgtctgttcacccgagcccgaatcgctagctgagcgagcactgccgcgtccggcaccatgccgggagccccacacccctcatctcatccaagctgcaccaggcatcgtttggctctccccactacacagatgaggacgataaggtgaaccaactttcccaaggtcacgtaacacatgggggtctcccgggaagcaggatgtgaaccccactctgtccagttactcctctgctcctcccctctgtcctctggcaatgggatgtagatgctggctctgccatgaagggtgtcttttgggtgacacacttcacctcctaaagcccatgcattcccgtcagtaagatggtgcagaaaggcacagccctcacggactgagcgaagatggctgaggtgatgtctgaagtgcattacagtacagtcatgccccatggaatgactgcacagccaatggtggtcccctacgattctaacactgtatttctactgtactttttctatgcttatgtgtgcttagatatgtgaataccactgtgttacaactgcatacggtactcaggacagtaacgtgatgtacaggtttgtggtctaggagcaacaagctgtagcgcatggcctgggtgtgtaggaggctgtgccgcttgatatttttttccttctcttccctggaattgctgtttgatttccctaagtatactctgtgaccgcacaatgacaagttaaatttctcaaaacgtatttgcattgctaaggcaggcacggctgtgtagtaatatgtcccatcatcaacccgtgagggtgtcacaggtggggcctttagccagggagacgcagcctcgcctggagtcctcctctcgtcttcctctgtctcaaccctgctgcagccctcctggggtgagcggcctctgcccatgctgggagcagggagcagcctctggctggcccacgaggctctgtcgcatctctgttccctctgcatgggggtggctgtcgacccttggggcagctgcagaggccgcaagaggggccatagctctctcaggctccttataaacagccattcctgccaccaggaacgtggcacagggtagggaagcccaagaggagatgctggaacacaggcagggctgtctggggtgccacatcccagggacaagaatagctggcattaactgctctaactagaactcctcccagtgtgagcactgctgcggctgcaagaagccctttgaggggctgcgaccccaaggcgcaggctcaaggatgcaaggctgattgcaacaccccggtaaggaagcagggcctggctgactttcttttagctgagtgaatgcagctctgaagcctgacctgggctgggacagccgaggcggccaccagagggcgctcctgcccccactctgctccaatgagtaaatgcaacaaatggttcatccccaggagtccgtgcgcccgcacagcggccgcctgtccagcctctgggaggctctggcatccgagtggtgtgaccacatggctggcttcctccccctgccctcctcaggccctgactcactggggttttgtgctcggactcaaagagctccattgacagcggggctggggtcggtttctctccacacagcctagcctgctgggaggcacaaccaggcaaatgtcacagggcccggcccctggactctggagccctgccctgacagctgggccaggagtgcggtcacagccccagcagaaggccctcacctcacaaggaacatgaggcgccttgccgggcgcgcaggccactcccaggtcactcaggattccaagttctcccccaagacgccttcagatgctgagcggcacaagggcctccccagggactggttgcaaagcctcctgctcagcttgagagggccaccagctccccactgtttactgttgttcctgagagaggccagagggagggaccagccagggagtggccagagggacagaaggggtggccttcctgagggcagggtgggtgccccagacctgagagcgctgcaggactcccctccacaggctcaggtggagcctccccagggtcctcctggccaggaaggcagagagccgacttctttcttcagctcccaacccaggcccagcccacggcgtgggagtcggggagagggagaggaggaggaaggaggaggagagagggagcttgtcttgtccctgagcagcgctctcagggcagaggtgaggcaccgggacatgaagttggaggacaagttcccaagcagggcttcctcgggctccccctcgcgacggtaatttgacacttggatctccaggacgaccaacaacaaaaaagccaggcagagacagcagctggctgtcagcagaggagctgggctgaggcgcccaggggagcagcggcgcccacgaaggaagtacgaggacagcacgtggaggctccgcgctggggcactgctgctcagcccccaacacctgagctcccaggtgagtggcaatggccacagaagaaggggggacagggagggagcagcaagggtcccctgcccccagggtgaagggccacagtctaccataaacacggagaggtcttcggggacatgctgggtcgcttccctgcagggaagtcagccagcctcctgcacacacctgcactctccctgctgctgggaccctgcactaggggagggctgggggctctgctcagagcgcctcctgctccgcctgctgtgcagcagaggggccccgagggcctgcttattctgcaagttcatttcagctcttttattcagggggcttaaaagagggatttggctgtccagcttgggagagaatggctgccggcctgctgagcctccctttttcccaggattagggcagagccctgtcgaggtcagcgcagggtctgcccagccagcatgcggcgcccccaggatgcagcaggactctgcccatctgtgtcctttcaggggcttggcccactcactgctggtgttctcagctcacggctcagcctgggtcctcctccctgggcccatctagaaccccataaactcctagatctccctctggtgatgagccttgaacaccaaaccaggaacctggaggactgactttcaactcaggctcaggtgggcagaaggtcacagaagtgaggctgggagggaccacgctggcaaccgggacctctgctgtgccaccgtgatgcacaggctgacatgacaccacccctaaggaagcaggacccggctgtttggttctttggggaacactgagagcagccctcctgggcagggcccgtgagccgaggctgcctactcctcctgccgccctgtcctcaagccagcgttaaagccaccaccccccatatgttttcctcaaagcaaacaagctggcatctagtgagaaacaaaaacaatgacccagggaaatgtggaaaccaaggactagcccaagtgttctcagctcagcagaggctgggggcttcggctggggctggtgtctggggagacaagctcctgcggtgttgggaggcgcacagtagggaagagtcaggccaggtcggggtcggggcacagcggtgagcctggagaccccagtggctgtcactcacaagacgccccaggcaggcaggtggggatccctgtcctgcatccacaggacacgagtggacagggtctctccaacacagtccctgaaccaggacggagggtgaatgaacagccagcttctgtagctgcagaaagagcgcctactgtttctaacaccagcagcagaaagcgcttcctcccgccctgggtggctacaggagcagggcctgccaggggttcaagcaccactttctacttccagttggagccagggcaaaaaggggagtcacccaaaggctcagtgccacaaataggggcatcccccccggctgctcaggcacaggaccctgcaaatctcccacaagtgtcagttatgcctccttctaggtggacctcaaacgagataatgcccaacagggcaagggtgactaaaacccaccatgacgaaacaacagggcagagcaagcagccctctggggccccgcgctgccaacacacctcgcttatcagtctcaaacacgccgcctgctgccagcccttcctcgtgaggcgcctggggttggagtatcagctctgcgaggaggaaacagggaagcttcgggaccaagtggcagctgtctggcctgcgggatgcctgcctgttgcaaggctccgtgtgccaggagatgccacataaaggaatgcttcccatccctccggctctgccagccttctctgccctgagtgtttcccctgtgctgaccgctactgcagccagggcacaccctctgaaggctccaagcagggctggctgggcagcctgggcagcaggagggcctggtggcagctgggctacactccctcttaaggccagagggagccaccacttgctctggcagccactcaggaacccctgaggaccctgagaagcctccaaccaaggcactactgagcgtggggttgggagggactctggttgccctggttcgcaggtgggcactaccaagcgtggggttgggagggactggttgccctggttcgcaggtgggaagtgtggttttggaaggagttgggtgaacctgagatagaaagacgggaaaaatatgggatcatcagtagccctcctgggcttccctgccttcctcctgccaaacctaggaagggaaaggggaggagaggtggccagcctcagagctcccatgttcccctcgccacagctgggaacactaaggttcccttaggagcagcggctggggcacatgccacacagtcacctgacggctgctggttatattgggcaccaagtgtcaggcactccttggcctggctttaaatagcccgctgggaagaccacctggggaccggctggaatgcgcctcctcctctttagagaacaggacccctcagctcccccacctgcgccatgaaggttcagtcgcgggtttacgctccaaatgacaagatatcaactgcaaaacaaagggggtcccggggttcctctccagctctctgggggcagaacagccacgtccaacggtcctacttctgctcactgtgtgacaggataccgtgagtacccctgggtcagaccctggggctgggtgaggctggccatgcctggctggcaaattcagcttccagtcagccccctagggaagccctgggcgcaaagctatgacactgtccacagccgcagcctgctgctgctgggaactgacacttttccccgctggaggccggggtccacccggcatgagtctgcagctctcccactttgcagcccctggaggaggctggccagagcttctcagcaacaaaccccacttttcctgcaccagtaaattcagcctcagtccaaccttcctcctccctgttctggtgagcacagccccaggtctctcgctcacaaggaaaagtgccccctgcaatctctccctgggtctctgggtgtggcacaagcgaaaaagctctccctgcccgctccctctttgaaggagtgtctctgctgggctacattaggccgtgtgggcacagtgccagtcaggctgaaaacgccagaccaagtgtagacagagagggaggggagaaaggcagcccagctcctgaaccacgcgcaaactgtcccgtaagggacactgtcggcattgtcgtccctctaagaatgagggaacctggaaagctggggcgtgaggatggcacggaggtcccggaaccaagaggggaccactgtccttgtgcaagcctgctccacctggccagagagaatgtcccattcagtctgaccagagggttcagtcctacactcaggctggctagactcacaagacctgtacctgtggtgacaaggactccaggtagtctcaaagagcctggtgtggccccggcctggtggtgatatgctgataaaagcagcttcagatccacaaatgtgggctggggctggccgagcacagccagctggcttccagggggctctcgggccctggctcctgtactgagcccactgcacgggcagtaccctcagcggggctgctcctggctatcttgctggtctaagctggagacaggcctccatggagagacagcgtggggcaccagtgggggtgctggctggggccctgtcctgctgtgtaacctcagagaagttgcttgctctctcgggtctcagcttccccacgtatagaaggaaggaggcgggagcggatgatctatagcattctaggaccctatgcctctcagtacatttgaaaactgagatcctcacctccacagaaacgcactcactccaggtgaggtgtgagaagctgggtggatctaactcagggaacccacggcttttgacaagaactcatctaattttccacggagccatcttctgcctgctaccctcatcatcacttaaaaaaacagctccccaggccgggcgcagtggctcacacctgtaatcccaacactttgggaggccgagggcggatcacctgatgtcaggagttcgagaccagtctggctaacatggtgaaatcctgtttctactaaaaatacaaaaattagccgggcatggtggcgcacactcgtgatcccagctactcgggaggctgaggcaggagaatcacttgaatctgggaggcagaggttgcagtgagctgagatcatgccattgcactctagcttgggcaacaagagagaaactccatctcaaagaaaaccaaaaccaacaacaaaaacatagctccccacctccagcttgcctaccttccttcagggcacacaccgcagacaccctaggacagacacccaaaaggtgttgggggtgctagtgacgatgcacgggggtgacagcccccaaagccagtgagacccgtcccgggggggcattctcgtgtgccgggcacccccctatggctgtctacaatgtgctgctagatggtcagtcctcccaatagcctcaaaacacgggcatctcattccatatcagagacatgaagcaacctgttcatgtcacaaaaggaagaagtggaggtggcattcaaggaggagcagctgaaaacactagagcaggcccctggcagagaaggaaatccagaaggtacatgccggctgccatcttgctcctgaagggctacgaggcagaagagggggcaaggtctaagtgaccacaagtgggactaactgggggccagcagggagtccgaccttctgcagtgggtgggctgcctcagcaggcggaggttcctcaccatcctgggtgctcatgcaaagaccacatggcctcaaggatggccgcaggccaattgcagggtggagggccccgttcgatgaccttcacggtggttctaaaccagctctgccaaggcagcggcaccgggagtgactggcctcactgacgtagccatctcagcgagaaccggctgagacctgggacaaggcaacgataattacagccaaaggtctggcaccagcccctggccacctgtccccaccaccacccctggattagagcaactgccttggtgaactggatcaggctgggttgggacaaggttgtctctggctcctctctaaagaggcaccagctccctcatgcccacaggagaggcagaaggggaaagccttctggagtggcaccttgggcctcttgggcaccctgagacaggaagaggctctcctggggcaggggtgggagtggagaggactttcctggtcaggctagagaaacagatgacgccagcaggggaggggctggcttgagcaacctgggcctcctgaccccctcccaacagacaggacagaaaccctggcaaaacctggagggacacggtgcggcctccccctctggcagaacaggcatgagtgtagaaactgggctggtgggagaggttggggggcctgggggacaggggggcagttttcacctctgactgaccctggccagaagccccatgaacctgctctcgggagaacctgctccttctgtccccacattgatggaaggcaagagtaccagcttggcatcctatcccagtctccccaccccgagggagctgtgccagtcccaagcacccaggcaaaacccagtagtggtacctcaagacaagggaatggaacagcgaagccagaaaccaccaccagccgccgccttggccggcagcccccgaagcaagcccttggtctcactgtcctcaccggcttcctccaccctgagctgtgtcagctgggtggggactgagggccaccactaggtggaagtcaccaggggtgcaatgtgtgagacctgacaaacttgttctgcgggctgcggatgggtgcgagggtggaatctcggtgctgcgacgagtgtggggccagccgtggaggctccaggtgttctctctgccccagcagagcccggcaggagccccaacaggaagccagcgcggcatggctgccaccgacttcgtgcaggagatgcgcgccgtgggcgagaggctgctgctcaagctgcagagactgccccaggctgagcccgtggagatcgtggccttctcagtcatcatccttttcacaggttagttggggcactcagcaccccatggctctccctggcatctgggagagaccacaccatggtgccagccagagggctggcagaggtggcgggtgtctgccggatcaaggaggaaaaccagttgtcccttgggggaagccaagggacttccctcatcctctgatatgctgcttgggtgatgggcggtgctggggactgggcccagcagtaccccaggatcccaaacgcggggatgacgggagccaggcttgggcagtgaaagagaagacacaacatggaggaggttggccctggcggctggcatggggaccgtccgcacctctcaccagcctctcggatctttctgacctccaccaaacctgtgggggaaagaccctggcaggcagtgggtttctctgggaggagggtgggcatcctttctctcccccaacctgagtcccgtgctctctcccggccctccagctactgttctgctgttgctgctgatagcctgcagctgctgctgcactcactgctgctgccctgagcggagaggcaggaaggtccaggtgcagccgacaccaccatgacggacgggcgatggctgaggagaagctggagaggagatggccaatgccatgacacaggccatcagcctggccctgcagcccttacccctcaagaccaggctcccctggccccagctctggcccagcccaggtacctggacactgacaacttgagccctaccaaggaaacaagggctggtataggtgcaaacctctcatctgccagtggacactgggtgctggggagtcagctgtttcaaagactgggtcaactgcctgggcttcttcgcctacctgcactttttaacaaaacaaggaagtaggggtccccataccttgatggagaacagtccccacctgtgggcaattggcccttggggctctgctgatacatgccaaagaggagcaaggcaatcagaggggctttgtgcaatagcttctgcatccgagctcccgccagagcgtgagcatgtcagtattctagtccagtatttgccagtttccaagtaaaagcttttgtgttacgtgtttctgcggtgccggactccctgaggttgggctgggctctgtacattgggagggggtatggctggtgcccgtccttcccaggcctctgctctccctgtgcccacgaaagctggaaaaccacgcagagaagcatgccacacaggcggttaacaccacgggaccagtggacggtgccatgaaattcctgtcatgcattagctgctaatgagctctgccaggctgaggcactactctgcagagtggcagagactgtgtttgcccaaaggcaggagctaagctcaggaacagcactttactctgtcaactgcctgcacctttggcctgcacatcccacactagcagactcagaccagtgggtcttcacaaactgccagaggaaggccctaatgtcacctgtaacctgcctcctgaccctgtggccctcccccatttgtgtgctgtctgggctcacaccctcaccctgtcagctgcgtgactcaacttccctaagccgaactcccccttggtgaaatggagcaaatcctggtactgcttcctggggtttgctgtgaggataaactaagatgacctatgtctagcactcagctcggtgctgggcatatctttagagccccatcaccatgacccgttattatttgcccctctaaacatgggaccaaccagggcaacagggacccattttaaagactggtcttgctgagaagcagcacctttccttccttaccccctcctttcagctgagtttttcttccagagaactttccaggtagagctacgaacccaggagtgaggggaggggaggcacatggctccagaaatgccaatgggtccagacagagcatcccgaggtgcctccccggggcttccccagagcctcaagaagtctgtgtttttcacatgcttccatcatcttggcctgcgtgacccgtgctctggccacctgggagcagagccctgtctacctgggaaacatgtcatggagaggggatcccagcccctgccacacccccgccatttccagctggcagtccaggccacactggcaatagcaggcagggaggggaagctctcaccctctggtttcactttctagtgtccacggacttgtctgacaggtttaggttaaagacccagagagtaagtgttttcatacaaaagaaaagaaattcaaaaatttgtccattctcagccccctccaaagaataggattcagaatgatgacgatgatcatgaggaggaggatgaagatgatgatgaagatggctaaaatttactgaggagttacacatactcagcattgtcttcagcattttggtgcagataaactcaattactcatcacagtacctccatgttgaagataccactattacccccattttagagatgaggaagctgggcctcagcgatgttaggtaacttgtctacattcaaccagctgaaaaggagcagggcctgcttgagtccagcctatctggctccagagcctctgcttaccacacccagggctctgagacccagaacttggcctcctggttgcagtacagataaggctctaatccattatcctccatcgaccaaccctacacccaaaacacccacaccccaaactctgtctcaaaataaccttcgcaggactgggtgggacccaacaggtaagagctggggtggtgcccaatgaggcacccctcccggaagaaaaacacagggtagtggacggacaggaaaccctgcatttttcattcccagcaccaatggctggagggtccctggaagccttctgtttgggagatggccaacagggaagcagcccaattcctgggtgacttttccataagccagttttcatcagcataagaatagccctgctccagggcggctgaggctgaggccctttgttagaaaatattctgcttccccagcccagctgcggagaggtgggaaccacagacagccctgggcacagacaggccgaatggccgctctagggcaggcggtgaacaactgctgagtccgcacaggattcggtccctgccctcacaggactcactcctccctgctccttggccaactggcacacaccaggcccggctgtcgggccaactccttcacaggcttcaaacccactgagattaacaaaccagacctgctctccgacagcagcctggcccgctcctttaagaggcagcttcttgtgccggtcttccctggggaagatgggcatggaaaggtggcagcagttgccccactgtgggaaagaataaacagaaagatgctgcagacctgggcggcctgaagacaggtgggggccatggaaggggcagccatcaggctggtttcaggtttagaggacgtctgacttggtcaccacctctctgttcccgccactgtgccatcctggaccatgccaccatcaatgcttacctgtggtcactgcagcagcatcctaagtggtccccacaatcatgtcgccagcctcttcatgcccaccccaagctgtgccctctgcttccgccacagggcaggctgctctcggctcctcaaaagggctgcactctactctgaagacctgcgtgccacactgtctgtacatcatgcctgattaaaagctacaatagggatgggcgtggtgactcctgcctgtaatcccagcactttgggaggctgaggcaggcagatcatttgaagtcaggagttcaagaccagcctgaccaacatggtgaaacctgtctctactaaaaatacaaaaaaattagccgggtgtggtggcgcacgcctgtagtcccagctactcgggaggctgaagcaggagaattgcttgaacccaggaggcagaggttgcagtgagctgagatcacgccaccgcactccagcctgagcgacagagtgagattccgtctcaagcaaacaaacaaaaaacaacaacagaccagcatagtatatcacatgcatgtaatcccagcactttggaaggccaaggatccttgagctcgggagtttgagaccagcctgggcaacatggggagaccctgtccctacaaatataaaaaaaaattagccaggtgtggtagcatacacctgtggtcccagctactcctgtggaggttgaggcaggaggactgcctggggcatgacagtggcactgcactccagcctgagtgacagagcaagaccctgtctcaaaaaaaataaaataaaaataaaaaatgacaataaagccacggatacaagaatctcattagaaaaacttggcagagagtatataaaagtttcctcccaaccgggcatggtggcacacgcctgtgatcccagctactcaggaggctgaggcaggagaatcgcctgaacccgggagacagaggttgcagtgagccaagatcacaccactgcactccagcctgggctacagagtgagactctgcctcaaaaaaaaaaaaaaaaaattatccaattggggccggcagttaattgaaagagctggtcaaagcaacttttgttaaagaacacctaagttctctacacatctattacttttttacatatctcacattaaatggaaacatacacctattccttggccggccttcctggccttttctctgagtgtgggcttgccaaccagagctcctggattgctatcttctagttttggttgagtgtgggcttgccaaccacagctcctggattgttattttctagttttggtttctttaaagcagaacaaaaacttaaagtcattggaacttaaaggcaaaggaagctgggtgtgaaaaccttctgggtttttacaaaatgtccctgatgtttagttatcatgtctgcatctttttcaacaggaacattatctgagtgattccaaagtcatcccaaagtagtcaataggtatttctagaaagaatttctttctccactcgctctgaggtgcagcacaggtgcttcagcgctcagactgtgtgctgctggattcaaactccaactcagttacttactagctgatgacctcggctaagttatttaacctctctgtgcccgttccccacatgtaaaattggggtttcagctattattgttgcttcattggttcccgggatgttaaattcaattatgtaattacaagtacaactgccatgaacaggtttgggaaccaacacttgactcttgataagcatctgacttaactgacggagctgcacgcaaagggtgagctagagactggcccactgctgtgagcattcagcatgccaagggccttagtcagtaagtttcacacaaggaaacagaaaacatcaggtaacccgggtcagtgacgcccatgatagttaagaacgactgttctaaatctgcctccatctgtcatccaaccctggccacacctggggagaatcacctggggatgtgtaaacaatacgacatcctggcaaccccagagactgatataagtggtaccaggtggggcctgggcatttctcaaagctcctagatctttaccagctgggataagcacccgagggctagaagggaagcccttggagggcagggcccgcctctctgatctcacaactggacacacagtgcctggcatggttcctggccatagcgggccctcacatcctagcttttaaaggagtatatggtggccactaggtttcaagcaccagggcacaggcttgatcccctcttcccagcttccctattgtgccagtgggcagaaaccaaccacacaatgttgctgaggccgtgcccagggagcagacaaaggcaccaatgggaagcctcaggggggagcaacacttcccccagaaacagttccaggaggcaccaggcgccagccagggctgcagttaatcattcaccccacaacacaggaagtgagccctacgccagtcccagccccagggcttcctgagctcggggcaggtccgcagtccacacgtcacccagacagaggacagcccagcccagccacaggtgaggcggcctgatggcctggggcaaaggccctcggtccagtctcttccccgtccaccccaagtctgacttctctcaggagggactcatgaacacgtgccctgagcacccccaaaatgacatcacacaagggcagaaaggagctgaagggggaacgtgaaaggcagaaagggagccgtggttgccaggcaaccagccctagcccacctttgtttgtttggtgacagcaactaaggtctggtcagggccgcttggccacgctcatgccttttcctctcaacagttgcttctttgagtcagggtgcagctctggtcacctggcggcctcttcagctcagccctccacaaagtgtgagcctgaaggaccaccctgaattgcccttgtaggacccagaacagctaccagcagaatcaggtaatggctccctccttctccacctgggctgccctcacctggctatgggcttgcagtctgcgataaggagctccgcttctagaggactcctaagttctattctcagctgctccaaggaggctaccgaggcctcagctggagttggcccctcctcggctcctatacgctctctcaaatgcctcccaaatgtttggcagttggggcaggaaaaacagggagactctatcatgatgctttttagattctagccaagtaggtctcagggatgagagagagtccttgctcacacttgctactcaggaaagaaggactggagaatccaggggcatcccctaggaagaatccagggccccacttcttgcgccagtcctggctcctgtatctagagcgggggaaatgccatttgctgctggctgcaggcatccagcacaaagactctagccctttcatgtcccctggctgccaggcgggccggctgctcacagaggctgctacagaggctggagtcggcgggcagagcatagcacctgggacagggcctgggagggctgcctgcactcaggtcctctgtccctcttttccagattctcatggaccaactggtattcaaagagacaatctggaatgatgcgttctggcagaacccctgggaccaggggggcctggcagtgattatcttattcatcaccgctgtcctgcttctcatcttatttgccatcgtgtttggtttactcacttccacagaaaacactcagtgtgaagcgggtgaagaggagtgacctgacttgctggggactgagatggcagcaggggaggcgagctgacctgcccccattccagtggtgggccccttcgcggttccctctggctcaggggccaagccctggtgtcttcctttcccaccaggaaaaagtctagtaaaatactgtatctggcttagggttggtcagactagtaagatggggaggctggtctgagaccaattctggctccttgaccctattgtttttagggttccccgaccagaaccctaaaagcacatggagaggatggctccactgcctcaggtggaaggagctatggctaacaaggttctctaacaggctcacaggcccagccagcaatttcacaaatccttgacagagaaagacacaaccaaatgaaataaaaattccttttcaaatctgctaacttgtgagagctcatttttaatccagatagagccaccagagcaagcttcccgaacaaagccgcaccggggcctgcacgctctagcctgcctgtctccagccatcttgcccaccccatcctgccctgcccctgggttctcagcgtgtctttcagttcttgaatatgcttgttctctcccaccacagggcctttgcacatgctattctcattgaccgggatgctctccctcacaccacactttactctatggcctagttagtccttcctcatcctttgtatctccgtttgaacctgactccctcaggtaaatcttccctaaccctcaaggattagggtaaggccacttgttttatactctcgaaacaccatttacaggacttatatgtctttgttgttgttgtttctttgtttttgagacagagtcttgctctgtcacccaggctagagtgcggtggcgctatctgggctcactgcaaactccacctcccgggtcacgccattctcctgcctcagcctcccgagtagctgggactacaggctcccaccaccgtgaccggctaatttttttgtatttttagtagagatggggtttcaccgtgttagccaggatggtctcgatctcctcaccttgtgatccacccgcctcagcctccaaagtgctaggattacacgcatgagccacggcgcccggcctttttttttttttttttgagatggggtctcactcccatcacccaggctgcactgtagtggcaccatctcggctcactgcagattcgacttctgagtttacatgatcctcccatctcagcctcctgagcagctgggactacaggcatgtgccaccatgcctggctaattgtgttttttggttttttttttttgtatttttagtagagacagggtcttgccatgttgcccaggctggtcttgaactcccaggctcaagcgatcctcccacttcagcctcccaaagtgctggtataacaggtatgagccaccatggccggctctgggacggggctatttctgcccactagtgtatcccccatgtccaatgtgcctggcacagagctggcatcagtcaatatttatcagctgaataaatgaatgaatgagtaaacacacagagaaacaagaagatgccaggctgttgggcacccccagccccaagatcccaggaaacaacagggcccaattcaatccaggtctaaacacaaggctgctcttccatctcaagatgccgaggcctcaagctggaggttgcttcaaacctaataactgttccctgtgacactaaaagacactcattgttatgaataatcaaacactgctttttcaaggctgcagcccagagaaagtagctacagatagagaagagaggaaaaccgctggctgccacagccccgcctcattagttaactgacctgagtatcttttctgctggtcccactcccatgtgcctcagaccccacaacaaactgacaagaaacctacagcttcctttgcagaaatgcacccacttctgctgagcccaccccactagctctgtccctcactgccaggtgcccgccccaagggatcgctggtgggaggctgcttcgacctcagcctccaatgagaactattcttaggaagcaaatatctggtggagaaggggctttttctttgtgctacacgccagttatgcaataaagaaacattcacttattcaaagaacagtagccaatacagacataccagcagcgtttattccagcctgctgcctggatttcagaatcatcacatgtagcaaaggagacaggcacgaggctgctcaagaggcagcgcaacaccgtcacctggactccttgagtccacagatgcctggaccccagcccctggcaaccaggccactgatgcactaagaagtcccagctccccggaaggtgacaggagaaatgaaggcagaggcccttgggaggacctgttcccttgcctggcaggcggagcagaccctggggacaggcagagttaaccctccagagagcattccagagcctcagacagccccagagcttttttcagcaaacaggactcacaatgaacaggaacacttggccctttcattcctcaccagaaataagagctctgctcaagaagcctaagaaggccaaatttagcaactcccatattaattgtgcttgaaaagggctctggtcgcaaaggctgcaggcaagggtggtcctggcactgcagccgaccacttttgctgggcgtggtcttgccacagaggccaaattagagacagcagtttggagaagaaaatagcttcagtccagaagccaccgactcactggtcaacaggaggaggtggaaataaaaacacacagcccaaagagtttctctgatttcctcgcttttttcttgcaaaaaccaagatggcccaggtgtatgcaaatgaggacgccactgaaaatcaggagacgggtgtttagtggcctcagtctaccatgagcttcgtgactgtgacctctctggacctcaatttattcacctctaagtctgaagcaatcacgtcagcgtcatccgacaggatcattccatgagatgagatgaatccaagagctttttagaccaaaatgtaaaaactcctcctgggtgtctctcctgcaggcactcacagctccgcatgcctggacacaacctgactacaccaagcagccctcagactctttccgtggcccctgccccatcgcctgcagatgcaggtaaaacagatgcgtgagttcaaagcacatgactccccgaggtaagtggggccacaggcttctgtgtgggtcctggataagggtgaggactactcaagtgatgccagaagtcccagctcggtggcacatgatgaccacaaagccgatggctcagagctggtcacatcccttggaactgagtggcttgtggggccagccatcccagaagagggtggagtggagggaaggacaccactcagaatactgagcaaatccccacactgcgagagatcccggggcctccaatagagaagagcaaggtcctgacttccacactgcccgacacaatggcctttgcaggcaggtgtcccttggtagcctacgggctgtcttatgtcagctgcttaactagggcgtgccggggaagtaaatgatctcactgacactttgctccacatataaaataagtcacttaccccagttcttcacagaaggtcaccagggcatcaaaggccatgatagtggctttatcagatgctttgtttcctctcttttcctggggacaaaaaatgaccacttagcaagtcttatagaattggactaccttagagccacaaaaagtaatgaggaggccgagtgcggtggctcacggctgtaatcccagcactttgggaggctgagccaggaggatcatttg

SEQ ID NO: 1487 - DNA, 1804 bp, Homo sapiens
gcggccgcctgtccagcctctgggaggctctggcatccgagtggtgtgaccacatggctggcttcctccccctgccctcctcaggccctgactcactggggttttgtgctcggactcaaagagctccattgacagcggggctggggtcggtttctctccacacagcctagcctgctgggaggcacaaccaggcaaatgtcacagggcccggcccctggactctggagccctgccctgacagctgggccaggagtgcggtcacagccccagcagaaggccctcacctcacaaggaacatgaggcgccttgccgggcgcgcaggccactcccaggtcactcaggattccaagttctcccccaagacgccttcagatgctgagcggcacaagggcctccccagggactggttgcaaagcctcctgctcagcttgagagggccaccagctccccactgtttactgttgttcctgagagaggccagagggagggaccagccagggagtggccagagggacagaaggggtggccttcctgagggcagggtgggtgccccagacctgagagcgctgcaggactcccctccacaggctcaggtggagcctccccagggtcctcctggccaggaaggcagagagccgacttctttcttcagctcccaacccaggcccagcccacggcgtgggagtcggggagagggagaggaggaggaaggaggaggagagagggagcttgtcttgtccctgagcagcgctctcagggcagaggtgaggcaccgggacatgaagttggaggacaagttcccaagcagggcttcctcgggctccccctcgcgacggtaatttgacacttggatctccaggacgaccaacaacaaaaaagccaggcagagacagcagctggctgtcagcagaggagctgggctgaggcgcccaggggagcagcggcgcccacgaaggaagtacgaggacagcacgtggaggctccgcgctggggcactgctgctcagcccccaacacctgagctcccagagcccggcaggagccccaacaggaagccagcgcggcatggctgccaccgacttcgtgcaggagatgcgcgccgtgggcgagaggctgctgctcaagctgcagagactgccccaggctgagcccgtggagatcgtggccttctcagtcatcatccttttcacagctactgttctgctgttgctgctgatagcctgcagctgctgctgcactcactgctgctgccctgagcggagaggcaggaaggtccaggtgcagccgacaccaccatgacggacgggcgatggctgaggagaagctggagaggagatggccaatgccatgacacaggccatcagcctggccctgcagcccttacccctcaagaccaggctcccctggccccagctctggcccagcccaggtacctggacactgacaacttgagccctaccaaggaaacaagggctggtataggtgcaaacctctcatctgccagtggacactgggtgctggggagtcagctgtttcaaagactgggtcaactgcctgggcttcttcgcctacctgcactttttaacaaaacaaggaagtaggggtccccataccttgatggagaacagtccccacctgtgggcaattggcccttggggctctgctgatacatgccaaagaggagcaaggcaatcagaggggctttgtgcaatagcttctgcatccgagctcccgccagagcgtgagcatgtcagtattctagtccagtatttgccagtttccaagtaaaagcttttgtgttacgt

SEQ ID NO: 1488 - protein, 99 aa, Homo sapiens
MTDGRWLRRSWRGDGQCHDTGHQPGPAALTPQDQAPLAPAQPRYLDTDNLSPTKETRAGIGANLSSASGHWVLGSQLFQRLGQLPGLLRLPALFNKTRK

SEQ ID NO: 1489 - DNA, 31236 bp, Mus musculus
tttattctgcagcccagaatggccctgactcatgatcctcttgtctcagcctcccaagtagctgggattacaggcatgtaccaccaaagttcagcttcattcttactttagaatatcaaaattcagtccgttgtgttatagcagccataagaaggctcaccaccccgtagctgagagcctgtgagcatacgtcagccactccatgatattccacccaaggagcctccaactctgccatttccaaagccctgctcagaggttcaaagtgtggatcgcgttacagagcaaggcatgtctgtactagatggtttgctgggctagacagttctgcctcttgggcaagaaaccccagggaaaagaggagtttgtactgaactgaagggtgtgagtcaggggccctaagttgccacactgattgactagaagaaacattttgctctcccactacactactcacaaagagaataattccaattggccgtgtcagcaaagtgggcggtgcacaggctgaggcttcagtggtctgcagggctgacctccagcccagtctcacaagctcagcgtctgagcaggggacaggcgcacttccccttcttccctgccttggtttttttctgatcttttactggaaggcactgaaatcagccctagagattccttatatgagatactacctggatcaagcccatatgttttcatggtggccttcactgaaacttaccaaatgggcaaaacttaaagtgagatgctcgggaaagtgactgactaattgcatgcactactccttcagtgaactcaagttcagtccccagaactcatctcgggtggtttaccacctcctgtaagggatttgatgccctctgctggcctcctggggtacctgcacttatgtgtatatacccatacacagatacacatgaacacacgtaattaaaaaaaaaaaaaagagtaagtgaatcacaatgccagtacttgccatttgtctattgataccttcttggctgggctggtaaaaagcgttatggtggaggagtcgaagtgcgtgtggatgacgtgcctatggcaaagcatatgttccaagacaccccagcagagctgcaggggagactgtcccacacctggcaatgatgccatcagcagtaggtatcggtgatcttcaggagtaaggagacacatcattatgtcggtacccaagggaaggattttctgtttaacacttggatatatgttacctggaagatctgtgctgagtcagttccagtgacgtttccctaggtgagatcttcagaagagttcctgtcagggaaaaaaaaaaactaactttcccagtgtcttggcaacggccacagataacactgagggctgaggctgctgcaatgagagagttgggcgaatggaaagtgtcattggaatccaagctgcgaaaaactagagcagacccaggaggagcttgtgagaaggtctagaagcacagagagaggtcctgtccggtcctagagtagacagaatggagtaggtgcagccatgtaatctgggcttctccagtcaccccacccaaacctgcactagtgatgggttggccccaccctttgacccacactcagtggaaggcttgggtatcctcctagcccctgcactgtgccatgtttcctcatccgaaataaggctgggttcacttccccggctgggatggatacatgaccacccaagatatctaactctctcttctttccaccatgttagatgggaacaaaatgaggctgtgataaaactctagaagaaccgaagcacagagaagctagaaagcctcggaccctcagttttttagcagaggggaggagctgacagggatgagtaactgagcaagggaaggtagtgaccaggaaagcagagggcttttaatctaaccacaattaatattaaaatgcaaaacaaccccccccaacctgactccatagacctggagtctcttcagaagcatcacctgttccaagggaagcgtgaatttagcatccttagtaggtacccaatgcacagtgggtactcatggtatgggacctcaccaagtcctctcagcagttctgttgtgaagctggggaagcctgataacagatgagagaactgagccaggggaaagcaattctccctcaaggacacacatttaaagagtggacatgtatactttatgcctatgtcaggcaacctcagtaaatagccttctgcttcccttggctacacactctgctgagagaaacttctccgctgaaaggcgggagtgcgggttgtatcactggaaaagctgaggccagacccctgggttgggagtctctgcttgatggctgatcacctgcatgtgtgttctggtcacagcacctgcttgccgccctttctttccatataacaaggtgtggtgtacgtttctgtgccttgactcttgacacttgctgcccatgtgatattcagtggttagaactcaagacatctggcttcagactttctcatcctactacagtggttttccaggtcggtggggaaggctgagaaatgaatgcccactctaccctctagacgcagcagctagaaacacttccaaggtacctcagctcagtatcttagaatcctcagctgccttcagttgttacagagcctcctattggttgttctccttccctttctgggatcatctatgctggccaaccacactcaaacccttgtcttaggttcaccttctgtgagaccctcaagctaagccagccagggattctgtgcccattttagtcagggctgttgaaagccacacaaatgctcaacccacactagtcttcacccaggctccagtcctctctctaacaatcccatcaaagcaatgtgtgttagtgcatgagaaaaagacatctcgattcactgtcaacttattgcacaatggaaggcccacggtgcatctgtccagatcctgggaaaggagcaacgtactttatgcctcaactcccacttccttggactagcttctaaacttcagacccgacctgagaatgacctagttcttgcttgacagggctaacaatgagagttcacaggtaatcctaaaacaggaactacacagacaagcaccagttgtatgttagaactgtaaatgtttaaattcaacaacccaactttcctacaaaagcgcctcagattgctatcaagcgttagtttctagttctgacactttcatcctttttaaataaccagagttctagggtgagagtcaaccaagaagctgtataagctaatttcccattatctttgtcaagtagctttcttggtatttcttttaccgagaaaaagcctataagggttatagcctaagtctgcctctgcttctgttccctctgcttcctggtcttcccagataataagcaagtagacactgagctcccactgacagagatagaaccacctcattcaccacgatggactgtgcaccctcaaactgcaaaccaaagtaaacccttcctacctgaagacttttttctgtcaggtattctgtgactgtggctagaaaagtaactaagacaaggactcccaatccatgttatttatttaaactctggttactgttagaatcccttcaaggatatcaatcgccattttgtatcatttaaatagtctccagctcattcaggctcagactaatggttagtgtatgacattgtgtgaaccatcctgaacattctgaagagagtctggatgttaacagtaaaaagtaaagtcagttggtcatggccacttaagaaggtggagctggactggtggctgggtgtaatggcctcctgtgctgcttctacgatgggcttcattgcaagtcacccttttctctggggttctcatggctgcctggccagcagtgggtaagcagaaagctcacaagcaaagccagtgttttatagaggcagacggtgtttcttctgctgtctccaccctctgaatatatctgtagctcagaccgatggtaaaggggaagactctttctcccctcttattgcttgttttgaaacacagtctcatggagctcaggttggccattagattgctacatagctgaggctggccttgaacttctgacccctgctgccttctcccaagtgttctgtctctctctctctctctctctctctctctctctctctctctctctctttccttcttcctttctttctcttttttaaagatttatttatttattatgtatatgagtacactgtagctgtcttcagacacacaaaaagacagcatcaaatcccattacagatggttgtgagccaccatgtggtggctgggaattgaactcaggacctctggaagagcagtcagtgctcttaaccagagccatctctctagtccctgtctctgtttcttcatagagagtgaatcaattgttgcctaaaggccaacacattgaatatttttttatcaattactgcattagttagcaatgagacaaggagaaccaacatagtctttgctgcctcccacttagggatagtctatgggaccagttgattggacccctgctttcataaaccttgtttccagtttgggtcattcagaggctacagctaatatacagttttcaaggtccaaaatattacagttcaaacagttctttggttcattctttcttttcaacaggtcaacaggatttctctagccctggctgtcctggaattctctatgtagaccagattgacttcaaagtctcagagaataggcagtctttgcttcctaagtgctgggattataaaggcatgtaccaccaagcagagttgttctagtgttttcttattaccagaaaagtaggagagagagagagagagagagagagagagagagagagagagagagagagagagagagagagagagagagaaagagagaaagagagagagagagagagagcaagagcatcaaagagtagttggctattcctttttcattaatggatatttgtactcttctgttgcacatgctttctgttgatggagtgcagctgcagccaacttaccatcggccattgagaacccttaaagcaggtgttccgggttgcaatcctggctcccccgcttgctggctggcgacatgatttcttcctctgtgaagtgattatatagtcctcctacaggctttgtttgaggatttgaggagtctgggaacaaaaagtgtctagaatagtgttgctgttctttagtaggaaagatgtgaggtcctcatgttggaattaaagcacacagagatgctgggaaacagtagaaaggaacaagttggtaatctacaagagctgtgagcaccactgctggtttggtttgggtttttttgtctgggctaggcctcattctgagaggtcctgtttcttatgttccgcaaatgattttgctctcttgcttaagagcagaaactctggtttcttgctggaaagaagcagtggggtcactcggtgggtcaatggtcatgccttttatttcaaaccctcctcacacgcaaccacaaatcaagggtttggtaagggtgggcggtaagagcacagccctgaaaagaaagcagagagactggtcttagttttaaagtgtggtctttaaagagatcaaacaagcaaacaaaaacctcagagaaatgcctaatactgtcagtgaccatcatgtatgtctgaagtcactgtgtttggcaaaagagtttgtccacagggttgccaaatatgaggagatggaaagtcccaagtctcaaatcctccttcttgaggatagaaagggtgtgtgggtgcttatggataaggtgttctaaggtgtggagagaggcgttcacagacaaggaagctgttggccacctgcacagaaaacagcagctattctgggagtggagtgtttgaccctttgtagaaaatggtcacccatcaaacacctggcatgaccaggcagtgagtcactggtttcaactggtttgagctagacacatttcagagaaattcctagacaaattcagattcctgaaaacaaggtaaataaatagttgcaccatagtgaccacacttcagtcatattatccataatgacactagtagaggcttatttctttactgcatagatgagtgactttttaaatatattattattattattattaattctttaagaatttccttcaaatcaagatctaccctttctttcctacccaccacctctactctgtttctcctcctcctcctcctccttctcctcttcctcctcttcttcctcttcctcctccttctcttcaccctctttctcctcctcctccccttttttttaaagaagacactatctctaggtagatgtcctggtcctctagctcttataagcttttcaccccttgagtgacttctaaaatcagtgaagagtcagcaaaccatagaagctaaagggaggaagattgctgtgaatttgaagctagcttggtctacaattcccaggacagcctggcctactagctagaatcaagtgaaatcaaagggtggattcaggtttcccatccatttcagcaccaggaattatttttttttacttttgggctttaaggaaataggcttctcctaacaaattcccacagccacactacacccagcccaacactgggccctggccacttggataaatggaagagggagcctggtcagtttgctgggaatgaaccttccattgtcctcaccctccaagaccagcccagagccatttggagatagtttgtgtaacactaaggcacagaggtgctgagctcattctgaagttacatgttgctctgagagtcccaggtaaaaactccatgttgtttttcagtgtcttctgtccacatgtgtatttgcatgcataaagtacactagtcttaagcattgagtctcatacataaacactcaaataggcaaagcttctccatcctcctcacacataccaaagtggccccatggcccctcagttggttcctacccaagggcaactgccaacctgacttctgaaccgttggcaggctatgcattagactttatagagatgaaaggctgtgcctactatgcctctttcacacccagtgtggtatctcagagtttcactcatgctgtctgtggagctgtgtgcttcctcactgactcaatgtttcccattgtctgagtcccattgtagtattccacagtgtgactacatcctttgcagccattctgttggaccaggctttaggttttttccaatttggagcaattataaatagccctgctatggacatttatgtgcattcctaattcatgattggcatgccccacccacttccttggtgacctgtctgccaaggtgcagttgacaggtatttatgaatgccactttcagaacccttggatgaggtagacaaactggtcagtgcttccaaagtgacttgaaatttaaaataagagatcacatacttgggggttggaggagggtgcagtgccagtggacgagtgcatgcttgttatgcttaaggccctgagcttgacccctagcccaccaaaaaaggagagagaaaaagagatgatttaccttgaaaagctgcctaaatgcttgttccttaagcaagccattagatatttatggacatcctcatctgtaaaatatgcatagcatagtattaatgttatgcacaagtaaggagctgttgcaagggattggggtataattgggttggataggaggtaaagtatttggatagggcttagctcatctaagcactcaattgctgttattgatttttttttttttttggtaatgatcatacagagtaaggtcaaagaagctatgatatcacataagttcattgacagaaccaatgcaaatgaagtgacctgtttaacgtctcatgtgaagccagtgtgttgctttgcttttgtgcttctatttttggtctttaattttgtggctgctctgtctttaaacaaagacagagtgtggaagtggaggaacaaaggaagacctgggctggggaaatctgattgctgtgggatcagcattaacctcaagactcagtactgaccatgcaggtacagtcaggctgttctgtgatatgcatacctggcttggattattccccatcccaccccatcccaccccagacttctaataatagataggaatttgaattcagtatgatctgacccaatatcaagaacttcagaggccagagaaataacccaactctttccaatcttagaagtgggtggatctgcacacttgcagaacggaaccacattgtgtcctatatcagacagttactatgatactgagtcggatgggatggtgagaattgtagcacatgagatgaaaaagttggctctgaagaagcagagaattcatcactgtggaaattgtcttcagcctagagacacagatttgtgtttcagttcttctacgtatcaacagtggaagctattccattgggtgaccatgcaaaggagggaaaattaactccacccacacctaaaggtttccttaactccatagaaatgtaaacatttaaacgtttcattttgaaatagtatcagacttaaaagaaaattgcacaaataatacaaagaagtgacctgcctccacccaaagtccccagtgttagccctttgccactgtcgctttgttctttctgttcatacacacattgcacatgtgcacatatgcaccttctttgtttctggaccattagagacttcatcacaggcattatgccccctttaccacactgttttgttgtttcctaaaaacaaagctatcaattgcaaagttcaatatagttatcaaactttgggggggggggaacatattaaagctgtgtttacacagttactgaagggctcttgcagacccgactagcatagcaaacacagtgctagcaggtcttgcccttcccacttccctctcccttgtaaaccatagactacatcattaagtcagccaccaaggtccattcccttatttggacactttcttattccagactcctaaggctgatcaccaaggtccagctatcaaagtcttcatgtccagcaatcaaaagcctcctttggttaacctaattaacatgccaattaaagcaaaccaccacaccctagcccatcctaatacagacctcctctttttccctctttaaaaaaaaaaaaagaaatcacacctgcaaggtcgtttgctgctgccttctgccaggaagcatccactttactcttcttgccagcttcataaagaatctctctgtgaaaataggtgtttggatgtagttggtgcctaatgggggcttctgggagggaacaccccactgtgggtgagtcccttcagttactaaagctgtaggttgtattcagatctcacctgatgcctcactgacctcctctgttgcaaattggttcagaacccaattcaaaatcccatcctactattagaaaaccctttagcttgcaggccagctaccctggcatgcatagccgtggacaacaaagaagagaccgtgactcaaatacagtaagagatgcgggtggacatccaagcttgtcctctgacctccctgtccctgccagcatatggccgctctcacacacatgcaggtgtgtgtgtgtgtgtgtgtgtgtgtgtgtgtttaaaaaggaagaaaatcctaccagataccatattaacagggaaggacagtagaacacttagattagaaggacttctgaaacttgtgcgaatgtagggagattaacataagcctgtttattttattgagtgtgttcaaggacagtgttatcagaacaagcttgtcttacctgcccttgagccgaggtggttctgtctgtagtctgtcaggtgttaaacgccctgatcacgtgtttgtcctctcctctgaaggctgtgtagagtcacagatgtgtaccccaagaaagcaccagttgccatcaccctctcttcagactgtggtcatcctagcttctgttttctttggcagatgtggtgttggagaaggccatgcacaaatgtatcttgaagcccctcaagggccatgtggaggccatgctgaaggacttccacacggctgacggctcgtggaaacaactcaaggaaaacctacaactcgtgcggcagaggaacccacaggagctgggggtctttgccccaacccctgacttgatggagctggagaaaatcaagcttaaattcatgaccatgcagaagatgtattcgccagaaaagaaagtcatgcttttgctacgggtctgtaagctcatctacactgtcatggagaacaactcaggtgagacagcctgtcacttggtccagatgtctgattgagccccgatatcccctctcttcagtctctcgatttcacctagcagcctctagaactacaaatgcaactgacagaattcgtcaaatgaattcgtctcatgcagcagagtcacataatagctcagtcagtgaacatggataaggacaaagtaagagttgtctagaatgctgacttaaagactttgtgcagcgtagtgcttatgagtttgtcaccctccctgtgcaaatgagtttctttacagagggtctttggccaccttaatcttaaaccctgcagttcccacatcagttgttaaatatgcccctctcctccctaatgtgagaatgaggtaaggcaccttattctgaactccaagtgcaatggaacattagtgagaacctttgccatactctggcccatgcctgtttatgctgataatctacaccacgtgtatgagaaatctggagtgcttggtgaaatgaggctgaaacgatgtgatcagaagccatcaaagaactacaaagtaggaaataagtcctcagaattcccctggctctttcctaaagatgcagaagtcccatgattcatcatgggtagtgactgagcccaccctgtcccaggcctacagagagtgggcgatgaccaaccttttttcttggcagaaattgccatggtagaaaaaccacagagagaaaacacaggctttcttacccattgctggagtggataggaatgcacatgtgcatgcattgcagactataatgagtgaagattttaacctctgagctcttgggaccagggaggtggttcagccagcaaagcgcttgtcaggcaagtttaaggaccagagttcagatctccagcatccacacagatgctgggtggatgtgtgtggcagcttacccacaaccccacacttgtgaggcagagaaaaggggatccccaggataatctgactagttagaatagccaaatcggtaagcttcaagtgagaaactctgcctcaataaatacagaagagaacaattgaggacaacacctaatgtcaacccctggcttctatgtgcatgtacacacacacacacacacacacgcacacacacacacacacacacgcacacacacacacacatagaccttgagctattgccagcctgtggacaaggcctctgaaatctgaagcacatatctctgtagctcatgagatcatttataaaaatttccaaaataatacctgctcaggattacattgttctgatagcattgtctctccatctgtacactggtactgtttcagacatgattatcttcattgtgggggctgttccacttcctctggagaagcttagcagcatcctgaataccatccgcaccctcaccttccagctgtgatcatgaaaactgtttccagatagtgtcaagtgtgctttctgctggcaaaaatcactccatttaagccattaagtcaccaccattgcaagcaaacaacataagagataaggacttatttttctccttctccatcttttccttcttctccttcttttcctcctcctcttcctcttcttccttctcctccttcttcctcctcctcttcctcttcctcctcctccctctatattgctattaatcaggtgctatcatcaatgcactgaatttctttcatcaacatagatttaaataaatcaaacaaataaaatgaacattgagcagagagcaaaattttcttctggcgtaagtttggtctgtcattgcattttcaatagatgtacacagaagacagtgagctgcaaagaattagcctaaggaaatctttcattcggggtttatattatgccttgataacagcttaaaacacttaaaagcactctgttctagtgcacaaatcttaaaaatgggaagaaaatctgagctgtctcggagacattcattatgagattgtgagcaagggctagtcccagaaagcagggggaagagtcaagggccacgtaagtgaattccaggaactcccacacctgtttataagtagcacatttccccagcatgactccttggtggctaataaaagcagcaaataggatgtgaaagaaagaaacatagataaaaatatcccaccttgccctctcttctgatcctagggaggatgtacggtgcagacgacttcttgccagtcctgacctatgtcatagctcagtgtgacatgcttgaactggacacggaaatcgagtacatgatggaactcctggacccatcactgctgcacggagaaggtaatatacccctccatgtgtcagaggaactggacagcgaggttttgggggaggggaggagcagttgacggggattacacattttaaatttgagataaaattcatggaatgtaagattagccactttggacctgggcacggtggtctacaactgtcaccttggcatttgagaggttgaagcagcacgctttggagtccaggccggcctgagctacacagcaaagaccaggcttaaaagcacggtgagggaaatagctgagccagtgaaatgcttttgagtctgcctttaaaccccagcatatgcatcgcagagctcgaaatgttggtataaattgcaatcccagccctggggaggtggagacacactggcctgccagccaggccagatcagcagtgagctccacaccaaaagagatccagtctcaggtaacaaggtgtatggaatctgaggaataataccaaaggttgtcctctggtgtctatctttattcgagcattcgtgtacacacacacacacacacacacacacacacacacacacacacacgactgggagtgcatacagagagtgctgtccactaccacctctatctagctccaaagcgtctttatcaccccaaatacatccctgtggctaggaaaccagttcctgggttgcttgacatctcattgattaactgcaggactaattggaatttaaagctaatttaaagctacctactagcctgggtgatttggtacatgcctctaatcctagcacttgagagagtcagaaattcaaggttatccttgactaaatagtgagttagaggccagcctggacagcatgagaccctgttcccccaaacaaattatgactttaaaaaaaattacagtaataatagtaattcattgtagaaaaattgaaattaaaaaaggagaaaatgcaaccaagcctgagaatcaacatttaacttagtagaattaaacatccactagaatatggtttccctttgtttgatatgcctgtgtttgtttgtttgtttgtttgtttgtctaagtactagggattgaacctagggcctcagatgtgcaaagcaagtaagtagccaatcactgaaccacagcccttaaaatatcattaaaaaaatacggattcttttatttagaaagttgctgagtttttattaaagaatagttacactgatagaaaaatagcctgctattgttaccactaaaatcaatgaaaagctggccttaacaacaacaacaacaacaaaagacttgtttcaaacaacaccattggtgtgcttgctgtttgctttggtgttcaggttcagtcctaccctgcgctcagtcttaactgaggacatcctagctccttctgcatcagttagaggttggatcataaagagccttcagatgcttgactgtgtagctcacaaccttgaaaggcgacaagagctgggactctcctgtgagctggtcattctggaaggagacaaatcggggcctgtgtgcacatctgttaattcttttcaggagtctcttgggcacccagatagaccctgatggggcagctgtgtttctctgttcctgttgagtttcagtctgggcttgagcacaaaggtctacctgtccttgggatgccctgggtttacatcatctaggaagacatgcccgccccatccctttttgggcgccactaacttgggataagtatcctccatcctgtccccaagccgaggcagatgtgaatgagctcttccggcctctgtgtctcacccggccgtatccatgaaatttcagccggggacccagatattccaatatgagcccgtgactcccacggtgtcttttcctcttccagggattgggcagtagagacaatgagtgtggctttgtccaggcaccgaggtagacatttgtaagctccagtgtggagccaacccttttcccaccatgtgattattgcggtttggggtttattttggtggtttctagtagcaagaagaccccttgaggctttggggaaaagagtgtctcagtgtcccttagaaaagcatccttctgttgttgacagtgtgtacttagatgcttacgtcttgtggtctgaggacagagacaccatttcctgccccctttcccagcagtgcctcagagtgagatcccgggtttcaagcttgtcttcttaaaggggaacaaatcagcattgcgttgtgacagatgggcaggattgtcttcgccagcaggaatccctgtgaggaaggaaaaaaaaaaaagaataatataaaaaaaaaaaaaaggatacactgatgtctaaacagcccgtgggttcctctgcatgaactgtgccaggcactctgcttgccttccttcctggggagagcatggcccaggcaggctgcctgcccgcggctctggactaatctgaggtattgaactgcagctcctccgatctggacctagagttgctgcagtcatgtgtcacaggcccatgctttctgtggcctgtccagagcgctcttgggttgactttacaacagtttcatgtcttttctgctgtgtaagcagccattctcatttacagcccagcaccatagatccccttgcaagctcagagctcttgcttctggcggggtatggttttgctgaaattgaaaaccttcctctaattggatccacatgtttcaaagtgtggccagttctgtgtttccagcatttgaggttttctccttagtgggctaagcatatcaggactgtggagtcaaaatttaaagtccaaggaacccctcagcaccccacagggattgtagctcccggagccactgttaaatgctgacaccaggatgcagattctagtagtcgtgtagattgccctggactcccctgtgtggcattcacacacttgagctagcgttataaactgagtcatgtgtgacttattcctgggacagatactaaggattaataatttgtagcaaaagttgctgtagagatcttaaattgtggatggtagggtcaggaaaactctaaacaaaaagcctgatatgggctgacttggcttgtggctatggctaaatggtagagcccgtggctagctgcaccctaaagcattgcaaagaaagaaagggggcgggggaatctccatcgatgactgccaacagcaaggctgctttgccaggttcaaccccaatgcgggttcacgggcctgttacccatgttcctgagaggtgaaaccatttcaatcctgcacatgggtcagaaagagttctgcaaggctccctgtgggcaattaaaggctttggccatgaaagtgacacttctttctcacttgattgcaatgaacttctggtctatgagtgaatcaattgtcacatctgccctctttaatgtgtgtctccacttctgggggacagggatacaggttctcataatctcctgttccccacctctgtcttgaacacatagtagaactctaatggatattttgtccttcttcccctaaactctttatgtagtgtttctgtcctatggggtattataaggcatctattgatgatataagatttatggaaggactatgtctttaaatacaaaatatgtagcatgcagagaattctcactacgccctcaaaacgccctctagtggcactcaagcacatttgcaaattcttcagcaagcaactgatttatttttaagacaaaccaagaaaaatacatagatatcttaaaatgtctcttgtctgtcagcactcctcactgacaggagagatggattttaatggcactctcagagggacaccactgtatttaatatgtaaatctcttctcttaaatgtggcaacagaaatgctgtgggctcttgggtgttccctgcccctggcacaggcttgggtcactccataaatgtgtgtgagatgaatgcttgagtagagatgagtgatacgctgtagggtgtgagtctctgtggaagcgatggagaaatcaccgtctacttccatgcctgtaaggctctgcgcctgagaattcaatcaaccacaaactgtaaaatttaaagcaaaaaataaataaaacaaacacatacaaactttttaattgtcctttcccctaaactctttatgtaatgtttctattctacagggtattttaagtcatctaatgatgatgtaagatttatgggaggattatgtagatcatatgcaaatgctgtgacttttttaatgacgagttaagcatccatagattttagtatacaggggtcagtccctagactctgtccctagaattgtatgacattaatgtctgtgcatctccgctgccatcgccagtgtgacactcctaaggacccattttcactgctcttccaggaggctattacttgaccagtgcctatggggcgctatctctgataaagaatttccaagaagaacaggctgcgagactgctcagctccgaagccagggacacgctgaggcagtggcacaagcggagaaccaccaaccgaactatcccctccgttgacgactttcaggtacacacccaagtccaagtcccagccctgcttccccgtctccagggaaggtagagctatttcctacagcacatggccttagggcctgagggcctggctcagggggagtcaccttgtagaaaaggaataatgaagccaccctctggtcactccagtgtctttagacgtgtacacagatgcacctcgactttcaaaggtccatgttctcactggctacactagaagagaaaagtgcactaactgtatctaacctatcaaacatggtaatgtaggaaaacagtgggcacctgtggggaagatttgttgtatcgaattgtgatcttgttgctgattgtcagggccagttcatcactgctatccagccttatctggtggatggtattcaatatagccagcctgggggtgggggaggttatagattcaaaacctggctgttaggatagttcagtggtagaccaaatgtgcaatgtcctgggttccttccctaacacttatagaaaaaagaaggaaaaataaaagtaaaagtcaagacatagtctctactgggtgtgactcacttttaaacataaagataaatataattatctccacataaaacatacacacagttggcctgctgttaaatacctaacccaacaaaatgtccaaaggagaaagccgaggcagagggaacggatatccagtttcctcaggaaacagcagtgcttatcctgcagcgcccccatcccctccccccctccacccctgttaccctttgggaagtgggggaggtgcaacaaggtatctttctaccgccacccctccccactttctccttcaagttctaaaccgaatcccctggaatcagtccggctcttaggacagcacctcagtttgagaggtcgagctgctgtgtggtccccatagggtgacacagagcctttccctggcccagcaacccccgagttccttctgtctgtgcaatggggatcggatctgcagctctctttgggcaatcatctgaaggctcctgtggaagcctgaaacgtggctgtgctttatttccaagtgctgcacagccagttccctagcaggaacctgaaacggcaggatgtatttgcctttgtgtccagattctcctcccttgccttccccctcccacttctctgaaaacaagccttggttcaaagtcaagcccgtgcttgaaaagcaaggtcagcatgttctccaggactgcaattttctcagaaattcctttcagacacaccaactacaaaagaacaacacatgctgtgcgcacacacacacctgcttaggttgttcaagagcatccacacggtgagttgtttagctcatgcagacgttgggctactgccatatcggatatgcaaggagatgggggtcccgagaggctcactgtctcctaaggcacctacatgactcttaatgccaagcttgcagccggctccttttacttccccagcatcacgttatgcttagtcagccccgtctcaaaagccttctggcagaatcaacatcccttccctgattcttcccacatttcagccccagccactgggagactgggagtcttatgtaaggtggcgccgcatgagatcaccatttggggagagtggtcagacctcagcagtttgaccaagcattgttgtctttgggtaggcttcctagaatggcacaaagcaagcatcatgggtgctggtatgtctagatgttttaaatcccttcctgctaactgctgccccagactctcctgctgtttgggttatttttcaagctgagaaaaatcccactttggatatggttcacactcttagtcaggatctcttcagcagctggccttataatggatatagaaagatgaaaaccagggctggcgggacttcctgttgtttccctttgcaatgagttaacacgtggcagttcagtccccgccatggtctctgccactgtccaagtacagatcagaatctttcctggcaagagctgtgtggtctgactaaacatctggacaagcccgagccttgagtggctctccagtttggccttgcacttacctctgaacagcgtctgttttcttttctgcgctagctcctgacatctctgttttccccttgcagaattacctccgagttgccttccaagaggtcaacagcggatgcactgggaagaccctccttgtgagaccgtacatcaccacagaggatgtgtgtcagctctgtgctgagaaatttaaggtggaggaccctgaagagtacagcctgtttctctttgttgatgagacatggcaacaactggcagaggacacttatcctcagaagatcaaggccgaactgcacagccggcctcagccccacatcttccactttgtctacaaacgaatcaagagtgatccttacggggtgattttccagaatggagaagacctcactccctcataggggacacttgggacttcccattgatacatccaaaaagggagctgagagtctagctttctggctgccttgggtttgagcttagaagacagccacctcctcaagcatccctcagttcagtgactaagccatccataggctgatttggccaagggcatcctttagatacattgcccagatgaggtagctgagatttgggaaatagtaagactctcatccagaaatggtaaattgcatttaatggttcaggtgtcctgagatcactggttagttaactagttaaccttagccagcttcagggttggcttacacatctgtatatgtgctgaggaaacacttaaggtacaaactcttctcttggattcgatagcagctgttgacaagactgtccgatgcagttcgtcaggtccctctcagctttgtggatggctccatccttccctcttgcccttcttttgtccatccttcatcctatacttttttttttttacaaagagcctttgtgtttttatatatttcatagaaaattttatagcagttgcaggtaaactgtcaggattggtttttaaaatatttttgtaacttttaaaatattctataagtatgcatgtgatttaacatttaatatttgaagataaatctcttgctggatttgagagtactgcattttagacgcctcatagataatctctcttctataactggatattttcggcaaatttgtggggagagacttctggttgtcttaaagaaatccctgacgctggccacaggctgcctttgaaaaatcgggtgtactgttgttacattgttgttacattgttcacttttagcggtgtattgttacattgttcacttttagtgctggtgtctgtttatgtttttaagcaatcgaggctgagaattagaagagaaatgaatgtagagagaggtagagagagaaacacagactctaagggggggactgaggaatgtagtctgcaggttcaggctcttcgcaagacgttggaaaaggagtcagtactgtaaaatatgtgctgcggtgagctttgacaaagatctgttccatatgctatctgctttggggaaaagtaaatcaaggataacgatccctctgacccattttgtaagccgacactaaggacatccatttatttggaggcagaaaccaagtcatgtataatacgagtttagttgagttcaatgagatgttgatggggagagaatgcactaaaaccaaaaccaaaccaaaaacaaaacaaaacaaaaaacaaaccttctgtatttggttggggcatggtagagctaacattcacacactagcatgctgggttccatcctcagtgtgacaaataatgagcaaaacaagcagaaaacatggatgtatggtgaagttagacttatgttgtataagatgagtttatggacacacgtattccagaagggtcatacatcagtgtaatacagatcattgcaaaacaaaagcagaaagccatgttactatcctgtgtaaggatgttcaggcatctgatctggaggacctcgtaccctgtacaaggcttttgttgtcccagaaccctcccttggcacatgctgggttgtgcttccttttgtaaatgattttcaatggaattttgcacataatacattgtaatactgtacaataatcctatgtaaaataatttttgcaatattcttcagttgtcttttttgttgttggtggtggtggtggcagctatttgtttgagtcagaatataatcatgtacccaaagatgctgtgcaagtgtacatgacagtggctggggcttggtggcctctgccttttaccatagcacccaggaggcagaggcacatggatctctgtgagttgcaggcaagctgtgctacatagtgagaccctgtttcaaacatccaggggcgcaaacacacatgtgtacgcatgcacacagtacacaaccatgaactccacgttgatctggtagttttgaagagcaaataggacactgctccaaagcttatggaccaatggaacagaaatcaaaaagcgaagagaacagttggtccatggcccacaagtatttgcacgattatccagcccagtacttggcttagatggctccagagcaaatcacaactgatctgaactcagagccaggcagggtcctgcagacaactcctccctgtccttaggcaacctctgctgtatcctggctgagagttaggattgcaaaatctgctagcatcgcaggcctgatcctctgctgggtgttctggggattgcagccatgcgactgctaagtgcccattgcatccctgtggatagggagaagggaagttcagagggtttctgggatatccataagatagctacttcagagaccagaaggaaggctgactgagcttgctttcaatgtttggagcgaagagacactgctcgcgacatctgtccagttgccctcccaactctgcaaatttagacgatgaggctgtccttaggctgaggtactcctcttagattaaaagcgggtcacgacatccaaattaggcagttcgagcaggccccgtgagagcagagtcagaaaagctagaatgagcagaagaaaacatcacaagacttgccctggtttgtcattgggcaatgcttccctggcagagtttcaacacatgtgtcttcagttttccccccacgcaggcatttctcacttctcagtttgtcaggaaacaggccctggtggagtttggatagggtaagagcagagtaaaaatatacatgctggacggagggagaggagggtgcacttccagacctaaaaatatcttgaatggcagccagaggaaggaattttgtttttgatgttggacagactgccaactatgacccccttagggacacagaaaaaaaagaaagaaatggaaattgttaaggttgtttgtatcatgtggaagttactttaaatctacaagcaaatgcaaactaaaggaaggaagctgggcctgactgcttccattcacaaaggcagcctcactgccctagcagctctgaccttcctcttctggaagaaacatgaaataaaaggggcctgtggtgtttaggagcctggctctaccctcaggtgtctgggaagactcacacaggtggggatctgtctatgtgggacacgtggtgtaattgcccagaagtgtctgagaacaaaatggcgactctctgttttcagaccattcgagtatgggtaaatttgagacccaaatgttgtttgccatttggtgatccttagtcgtgtggggaagatgaccttctccacaagtcacattacagtgccgaatcacaagcagatggcgggaaaggagagggagggaagaactggcatttgtttcaggaaacatgttccatactgaaaagggtctgtgttttagcatcaatgagtgggtagcagctggcccagacttccacatgaatattgactctgttggggaaggaaccatagggagtttaaaagaacaaaacaaaacaaaacaaaaagagggaagcatatttggagttaggagtgtagcttgataatacagggcttgtgtaacatactcttggtcctgtgttcgatacccagcatgcactgcacacgcacggctacccaccactcctcactcccacctgtaccccccacacacacacacacccaccaggaactcactcagagatccgaagggtatcagtactcttcattttacattttgttgatgtcatttgatgtttaagacaagtttcaccatgtaccctaaaactggccataaacttgctgtggtcctcctgtctctgactcctgagtcagagactttgttttcttttcagactaagagattgaacccagactagataggtgctttactattgatccccaccccagttcagtccagagccaatactcctttgttgtcattttgagatagggtctcacacagtccagggcggtctcaagctccctgtaaagtcaagtatggggctggtgagatggctcagtgggtaagagcacccgactgctcttccgaaggtccggagttcaaatcccagcaaccacatggtggctcacaaccatctgtaacaagatctgactccactcttctggagtgtctgaagacagctacagtgtacttacatataataaataaataaataaatcttaaaaaaaaagtcaagtatgactttgaactcctgatcctgagtgctgggattatatacatgtgacacagagcccagctagtgggccagtactcttacctgagggataaccaaggtttgtcctgaggattctggatggaaaatgtcccaaggagtgacgtggctaggggacgggttcttttcttgattctaataaaaactggaatcctaaagcaggattttccaaaattcttattctctatattaaaagcacctagaatagcattatatgactgcctctgggtatttcctttgacagaatatattcaaatcaatgtagctgaagattttacagtttgccttgtggggatgaggtctacagagagctaggaaagacattcagaatacccctggcttgcctctcggagcagctcgtacatttccaggacatttgtcactcacacaatagaaggtgtagtcactagctcttcctctttccttcatgtgatcatctccagttcttcttatgccccacccccaccccacccctacctgggagctatagggcatttatctctcgcagcaaatcttaaaatgcttgtattccactccaaggcctcctgtcaaaacacaggctatgacttgccttcttgcttgcttttccagctctagctagagaattcattgtgaatgaaccatcaaccacccaccctgtctgtcacaaagactccgaggcaactgctgcagttttaagtgtgtaattttaagtaattttgattttgcttctcagtgttgggatgggatccaggtccttgtgttctctaggcaagcactctgcctctgagttgggacacccagccctaggctacatcttgaaatcacctggggctgcctagaccatcagtggtcttcaagtggtacccaagtgtcccggtgattaacacctcaggatgctcccaccaagagctaccaggcacaattcttaaagtgacagcaccgtgggcatgtagcctcttgcttggccactaacgtctgaatagtgcacactccttatttcgctcaagtactttgggcccctttatccaacataaacataaagctgattacaaattttctagaagccacatttaaaaaaagaaaaaatcctttaatcccagcacttgggaggcagaggcaggcagatttctgagttcagttcgaggccagcctggtctacaaagtgagttcctgtacagccaaggctacacaaagaaaccctgtctcgaaaaaccaagaaagaaagaaagagagagagagtgagagagaaaaaaagactagcagttcaaattaattttatagatgttatttaacccacgagaatccaaatattatatttcaacaatataaaacattaaataggtattttacattcttttaaaaatataagtcttcaaaaatcttatgtttattttatactcaatagcacatctaattacacatggactttatctcaaatcatctctagtctctgtgcctagtggccaccaaactggataatgaagttataacgaattagcagaaatgattttaagtgtgtgtgtgtgtgtgtgagagagagagagagagagagagagagacgcgcaagcgagagagcgagagagcgcgagaatgcatttcctactagctaagcgtaccaccaggagctatagttagaatgttttccccgcaaaggaagaaaaacagaggaaagaggatgcaaagacaagtcttgctgatctcccattcatggctaaaatgtgatcctgtgatgagccatctccacccccacagcagtctgaaatagtactcccaaaacggaattaataatgagctaaaaataataccgtaatcagggttatcccaacagttccccttcttttaatttcatttatttattatgttcacttatttaaagacatccatcagtgctactcctaacttactttggaaaaaagaagccatagagaggacatggtgctcaacctggcagccgcttggcccgcttgtcgggctttcccagccacggggtctcccgaacctcctcttctctctggggctctggggcttctgcggtcgctgtgggactttgtggggctgctgcctccgccgttggtggccaggagacgcccaagtgtgaggacctcagagtgggacaatatatttgtaaagaaccaaaaatgaacgatgctaaacaagactcagtcaactgtacaaactatacagctcgtgttcagtgttttccagcttgtaaggatttgagtggaaatgaaacacattttactggaaatgaagttggttttctcaagcccgtatcttgccaaaatgtcaatggctatttggctatttgtgccgagtggcagttgctttactcctggtttgggatggctgggagattgattttaccttggagtttctacctgaagcttattagagttttgcaccataagattttgtggaattgggagcctgattgatgtcgtgtttatttcagtgcagattgttggcccttcagtagttacattatagactattatgaaaccagacttacaagactcagcattactaatgaaacatttagaaaaacacacttggatccactaagtgtttaaaatgaggaaaacctttgagtcttcctgatttcagtcaagaaccctgtatgtgaaatcccaaattttccttagtatattgcttgatgggttctagatgatgttttaacatgagctcaacttcgatttgtagatttagttaaaatatattattcctagacttatttaatagactttcttagaaattggtacaatatttttttgtgggcttctgtctctatgagttagctagtctgctactcgacatttgtcattttcatttgtgaaaaataaaaatataacccatttagaaaaagaaagaagaaagaaagaaagaaagaaagaaagaaagaaagaaagaaagaaagaaagaaagaaagaaaagaaagaccatacagtatgtgatgtggttcatttgtattatttcttttgcccagattccatatttgctgtagctgtgggagaataggcttatttgacagattgcaatgttagttaattttctttttcctcttcttctcctgaccatttgtttactggtgtgcaggaggatgcagttcattatgaactgaaagaaagaaaaacaaatgtcataacgttaagctgctaacagcactttaaccaactgaaagtccatacagaagtcaaccagcaccgaggcaggagactgtctatcctgacagccacaggtcaaactccctgcccactggaagtccactaggattccaagctgctcttggaattgatgaattagaatctacttttggaaatagtggtatagcatttacctctcatgtacaaggtcctgaagccagttcccagcactgcatcaaaaaggggggggggcggacaaagaaattgagaatttgtatttctgcactttaacaaaactccccaccccatggctttacgttcacttcaatacaatatggcttggctgcaaaacactgcaaagcatattagggacacaggacctggtcagctgattcaaatagacaaacatggtgctatgctaccctacccctcagtgagaggatacagactatgatgcctagtagaattatggcagacaatcttgcttaaatcacctgtatatcctacaaaaaggataaaaatgtgtatatcaaaagcaagtatttacctcatgaatagccatgatatcttgctttttaggcaaagggtcctctggacctggggcgatgattctaaaaatgagaaggtgacagtaaaaacaatgactttgctggaagctgtgtgtcaggaaggcctgtgtctgggctagctgcttgtagatatgtatgtagtaagcacatgtgtgtgtgtgtgtgtgtgtgtgtgtgtgtgtgtgtgtgtgtgtgcgcgcgcgcgtgtgcatgcatgtatgtagtatgattatatagtccatctagttaactagtcagtcacactgtctatatgtgatgtgagaggtttatgagccttttagttttcttaggagacaactttttttgtttgtttacttatttatttatttatttatttttatgcatatgctttgctgtcttcagacacaccagaagagggcattagatcccattacagatgatggtgagccaccatgtggttgctaggaattgaactcaggacctctggaagagcagtcggtgctcttaaccactgagccaactctccagccccgacaacttctttttaaaggcaatttgcccaaccaaagacctatcaatgatggggctgccttactcattggttttgaagaatgaagacggtattttaaaatcaaatgtatttgctagccaaagaatgaattacagaaaagcaagctgtgaaaggtgctgcctccacttctccagaaaagagacagggtttctctgtgtagccctggttgtccgggaacttgctctgtagaccaggctggcctcttaactcagagagccacctgcctgaccaagccagctcagtctgtcaacagagtctcaagggagcaaggattgaaaagaaaaagacaattagacagcattataacatcatggccccagccagttctgaagctgtctgtttgttttttgtttttttgtttttttcagtctgcttttatatcattctcggtacatacaaagaatatggtcaaggataaggaatagacaaggcaatacacaaaaatagtcaaggaacagacaaggcaataaacaaagtcctgtggtaatcagggacttatcaagatggtcaagatcttgagtttacttctttgacttagccaaatgtcaaattcctgctgagcctacttctgtgtcctggcccaatgtcaaattcttgccaaatttctagaagtggcccccaagagctccccacacctgcctctgcctcccaagtgctgggattaaaggcatgcgcagccaccactgtctggcaatatcattcatgaggtttgcctcccattttgagggagggatttaaaataaaaactgcattatttattaagtcaaacattagcaggttttaatagtcacagtgctcttgctctccactcaaactcattttcaatgccgcctctgccaaacctccttcagctccttcagctccttctccataattagcttcaatttttctaaaaaccataattacatggcagtttagacttcctttcaatgtaattttggagaggaagatcctgatgataaaacctggggcttatgcatgctaatcaagcctcaaccatgagttaggctctagttgggcattaatttttgttccattatggatggtagagatgtgaccacctctttaatatgccctctccatatgttgcacatgtctttttttttttttttttgaagactatagagtgtggctacttatgagacgttcctcttgggtgaggtggtttcactactatgccccaacaaaatttgcctctatctagctgggagttggggtggggggatcagtgtagctgttggcatcctgggattcagagggtttccatctttcagatgccccacttccagtggagggccagtgcctctgtgtccgtcctggaagcacactgagtgttacagtatccatccaagcataggtgtaggtgagggtctccaagacagtcaattctaagtgtcatggcagtagctacatttactattttggcagcctcttttttttttttaatttatttacttattttatgtgagtacattgtaactgtcttcagatacactggaagagggcatcagatcctattacagatggttgtgagccaccatgtggttgctgggcattgaactcaggacctctggaagagcagccagtgttcttaactgctgagccatctctccagccaccttggcagcctcttaagttacacatcaaagcattttttaaggaacaacatttcttctcttctcttctcttctcttctcttctcttctcttctcttctcttctcttctcttctcttctcttctcttctcttctcttttctctctctctctctctctctctctctctctctctctctctctctctcttttttaaatttggtttttcaaggcagggtttctctgtatagccctggctattctggaactcactctgtagaccaggctggcctcgaactcagaaatccgcctgcctctgcctcccaagtgctgggagtacaggcgtgcattaccacgcccgtcgaaggacatcgtttctccttcccccttcttttatgagattataggtgttcctcattgccttggataggattgcaatctgacaggataagaccttgagtcataaaggatgcacaaggggattatgacatcttctaccataaatgaaatttatgattttgcttgtaaggttgctagaaaagtgcacatttacaattggggagagataggccaatcttgctcatctatgtttaagaatggcttatccctgttgtgggatttgctgtagaggaaggaagatcacgagtttgaggccagacggggctacccattttttcctagcactcaggaggcagaggcaggcagaactctgagcttgaggacagcctgtctacagagcaagttcttggacatccagagctacacagagaaaacccatctcaaaaaacaaaaacaaaacaaacagaaaagttcactgccattttaacattcttagctaagtgtcttggtacaaaagtgctatctctacctaggtgtcctttacagctcaacctgttaatggcgctggaatttttaactccaagctagtgagaggcttcaaccagattccaaggcagtgaggctcctttccgttccaatctccttttaccttttcttgtctttccagtcttccactcttcctgaccacttgggcacaacctgtctgtctctctagggagcaagggtctcactttctccctgctcttaaacctgctgtgcccagccccaacactccccccccctccacacacacatacactctgcacaggaaatgtacagttttttttcttgttggcttttttctcctgctctgaaccattgctttctcctgtccaaaaagttttctggaatccaaaattttgttgccagttctcattgtctcttggcctctcgtccaacctctttgtccaaatgggctaggacttcttaaattccattctgataaacttatttctccaatagtaaaatgagccgattcaatccagattagattatattacatgcaggtttattgggaaactgctctagagcaagttcactggccccaaggaccaatgccagaccccagaccctggacaggaaatttcagggttgggggcagggtacaccaggtagggactgagggatgctgagagaacctgcggccaagtctgctttgatatgtaaaatatgtataccagtcccttgtcccagggtgtgtgtgtgtgtgtgtgtgtgtgtgtgtgtgtgtgtgtgtgtgtgtgtgtgtg

SEQ ID NO: 1490 - DNA, 2617 bp, Mus musculus
agatgtggtgttggagaaggccatgcacaaatgtatcttgaagcccctcaagggccatgtggaggccatgctgaaggacttccacacggctgacggctcgtggaaacaactcaaggaaaacctacaactcgtgcggcagaggaacccacaggagctgggggtctttgccccaacccctgacttgatggagctggagaaaatcaagcttaaattcatgaccatgcagaagatgtattcgccagaaaagaaagtcatgcttttgctacgggtctgtaagctcatctacactgtcatggagaacaactcagggaggatgtacggtgcagacgacttcttgccagtcctgacctatgtcatagctcagtgtgacatgcttgaactggacacggaaatcgagtacatgatggaactcctggacccatcactgctgcacggagaaggaggctattacttgaccagtgcctatggggcgctatctctgataaagaatttccaagaagaacaggctgcgagactgctcagctccgaagccagggacacgctgaggcagtggcacaagcggagaaccaccaaccgaactatcccctccgttgacgactttcagaattacctccgagttgccttccaagaggtcaacagcggatgcactgggaagaccctccttgtgagaccgtacatcaccacagaggatgtgtgtcagctctgtgctgagaaatttaaggtggaggaccctgaagagtacagcctgtttctctttgttgatgagacatggcaacaactggcagaggacacttatcctcagaagatcaaggccgaactgcacagccggcctcagccccacatcttccactttgtctacaaacgaatcaagagtgatccttacggggtgattttccagaatggagaagacctcactccctcataggggacacttgggacttcccattgatacatccaaaaagggagctgagagtctagctttctggctgccttgggtttgagcttagaagacagccacctcctcaagcatccctcagttcagtgactaagccatccataggctgatttggccaagggcatcctttagatacattgcccagatgaggtagctgagatttgggaaatagtaagactctcatccagaaatggtaaattgcatttaatggttcaggtgtcctgagatcactggttagttaactagttaaccttagccagcttcagggttggcttacacatctgtatatgtgctgaggaaacacttaaggtacaaactcttctcttggattcgatagcagctgttgacaagactgtccgatgcagttcgtcaggtccctctcagctttgtggatggctccatccttccctcttgcccttcttttgtccatccttcatcctatacttttttttttttacaaagagcctttgtgtttttatatatttcatagaaaattttatagcagttgcaggtaaactgtcaggattggtttttaaaatatttttgtaacttttaaaatattctataagtatgcatgtgatttaacatttaatatttgaagataaatctcttgctggatttgagagtactgcattttagacgcctcatagataatctctcttctataactggatattttcggcaaatttgtggggagagacttctggttgtcttaaagaaatccctgacgctggccacaggctgcctttgaaaaatcgggtgtactgttgttacattgttgttacattgttcacttttagcggtgtattgttacattgttcacttttagtgctggtgtctgtttatgtttttaagcaatcgaggctgagaattagaagagaaatgaatgtagagagaggtagagagagaaacacagactctaagggggggactgaggaatgtagtctgcaggttcaggctcttcgcaagacgttggaaaaggagtcagtactgtaaaatatgtgctgcggtgagctttgacaaagatctgttccatatgctatctgctttggggaaaagtaaatcaaggataacgatccctctgacccattttgtaagccgacactaaggacatccatttatttggaggcagaaaccaagtcatgtataatacgagtttagttgagttcaatgagatgttgatggggagagaatgcactaaaaccaaaaccaaaccaaaaacaaaacaaaacaaaaaacaaaccttctgtatttggttggggcatggtagagctaacattcacacactagcatgctgggttccatcctcagtgtgacaaataatgagcaaaacaagcagaaaacatggatgtatggtgaagttagacttatgttgtataagatgagtttatggacacacgtattccagaagggtcatacatcagtgtaatacagatcattgcaaaacaaaagcagaaagccatgttactatcctgtgtaaggatgttcaggcatctgatctggaggacctcgtaccctgtacaaggcttttgttgtcccagaaccctcccttggcacatgctgggttgtgcttccttttgtaaatgattttcaatggaattttgcacataatacattgtaatactgtacaataatcctatgtaaaataatttttgcaatatt

SEQ ID NO: 1491 - protein, 307 aa, Mus musculus
DVVLEKAMHKCILKPLKGHVEAMLKDFHTADGSWKQLKENLQLVRQRNPQELGVFAPTPDLMELEKIKLKFMTMQKMYSPEKKVMLLLRVCKLIYTVMENNSGRMYGADDFLPVLTYVIAQCDMLELDTEIEYMMELLDPSLLHGEGGYYLTSAYGALSLIKNFQEEQAARLLSSEARDTLRQWHKRRTTNRTIPSVDDFQNYLRVAFQEVNSGCTGKTLLVRPYITTEDVCQLCAEKFKVEDPEEYSLFLFVDETWQQLAEDTYPQKIKAELHSRPQPHIFHFVYKRIKSDPYGVIFQNGEDLTPS

SEQ ID NO: 1492 - DNA, 96375 bp, Mus musculus
  misc_feature (1)...(96375): n = A,T,C or G
ctctcagtgtacagatctaatttcctacatttgctatagtttattacttcggtgtatgaagaatcaagtcatgaaacctccttaaagactctgtggccaggactgggcgagtgaggtgccacggtgtactggccttggctctgcctgctcaccagagctcattattaaatctgtgtgccttttgccagtctgttgaagtcattgtggaaggttgcagtcagctctggtagacattttcataccacaaaacaagcacacattaaaacttggagctttgagtcctcagcaagcaaatgttttttgttttgggttttgtttttttgtttttttgtttttgtttttgtgctttattggtttaaaggagagaaggagagagtaaatgttgtaatgatgaattgctggttttggaaggtcttcaatacatacagtataaaaagtagcaggtgggtggagtgtataggttggtgagagtaggctttcacagacccttggtcccatcagcaaggaggaggaggacaaggatgggacagcaaatgtgtgacttttgtcacgctgacaaaatttcaacaactttttttatcaagagaagctgctttgctcttaggcctgtggcactataggatgtcatggcaggagggcatcatagagaaagactgcttacctcctggcagcaagagagagagagagagagagagagagagagaagctagggataagctctaccctccaacgaggtcccatttcttggtatcccactcagctatgaaatgcatttgtgaggttagcttcttcatgatccagtaaccttgagatagcaccgccggctgaataaacaagccttcaatccctgagccttttacctgagaatatatttcacattcagacacaacacagctctgttcatggtattcacgaccccatgcactcccagggctactgccttacgctagaatgaccttccttctttacttttaggtggctcactttgacacatacctttttttcttttttttgagatgggatataattgtatagtctaggctgaccatgcctagtgatgtaggacatctttatgtcgttattaaacttgatatgttcactacttcttacaaataacaaaaaaatgctagtaactaagatagaaatattcaagaataaagagcatatcactcttaaaactactctcttcaaaatttaaattagatgaacatccgtggaaaaaatcttctccactgtctattctgaatatcctacacaagaaccagttctatatggattggagacctgtgcatgaaagtaaacactagaagcatttagaacacgagagagctggggtgcagcagagtgactgaacataaggccccagggttcaatatccagcactacaaaaaaaaattagaattaaatatgttctcttatagctaaacaatggtttcaaaaaaataaataaataaaaccgaggagcaattttaagcatgttaagtgtcttgtataagaaaattcaccaaataattaagatgacctaatggagtttgctctagaaaatacgctctgtgtgaatattattaatattgggaccattccaatgaaaatacttgtgtttattaaacatggagttgaaagttccttaaaagtcacaaagaccagattaaacaagattgggccaacacatctttcatcagttcatggctctgtctcatgatctaatgctgaaccaaaagagagcagggtggcaaggaaggggaagaagaggaggaggaaggggaagaagaggaggaggacggggaggaggaggaggaggacggggaggaggagaatgaatgcatacaggtccccctacacttgcagtgatgtggaagagcaggcacatacagggtctctattttgttgattccaacatcttcgaattaaagacctgactagagggtaacttcattttcttcctgtcctgagaagccaaggtggcctctgtgccaagattattgaactgctcgggtgcactctctgctacctaccatccagtggtccttacatttattcaagctgttttctccccatcctctgcatctctgcttcccacagccgagctgttacataccccaaatccagcttgtgtctctcgtttctgagtagattctactcatctgagagcagctagttttgttacgagcctgagtccctgtctgtccagacacaggccacagaggagaggtggcaggcagaaccactcaagtggcataccagatgcagtctgtggtctcctccaggtctacaccaggtcaccctggtgtaacggtggtcacacacagcacagaagtgagggaagccagcatgagctctggtgatcttaagagtttgtgtcctgtctaaaacattcaaagcagcagccatactggaatagtgacagtatgtccagacacactgtgtgttacactgtgtgggacagtgtcttctactccaatacttttaaataggacagtgtgtgaaattgctactgtggtatgcataagtctctccacacgtctatgtctttaaaaacatattgtttcctgggctagtgcagtagatgaaggcacccgtttgccaagactgatggcctgagttgaatccccaggatccacacggtgaaaggagagagccaactcctgctaagtgatctctgacctccacacacttggtatggcttatatgagcacgcacacacacacacacacacacacacacacatcaagcaaacaaataaaatggaatggaaaacaaactgcttagacatgatgagtcctcatctcagaatattgagacagatcattttttaaaaatgtttttaatatgctgggacgtagttcagtggtggaacacttgtgtagtacatgctgggctctgtccaattcctagtatcgtgtgtttctccctgtctgtgtgtctgtctgtgtgtctgtctgtctgtctgactctatcattgtctctctgtctctctgtccccctctctctcacacacacactcactcacacacacacacacacacacacacacaagggtttaatatattgtttgtgctaggtagtctttgtaggcttaatcagagaactgctaattgacagcctctgttgactggcgtatgcacgctcttttacaccatgtacagacatctttgaactaggaagccctgagcttctctttcttacctactggttgaccctgaccttgagaagaacctagagtttatggcttctgtattcatagggtccactgggtcaagagccaaggtggatgcttccacattgtgtgtgaagtcactaatacagtgagatgatttgaaatgcttatcttttttagtgaccttgggatagactccccctctccctcctcagacatattccacttgggcagaggctgccaactctgaagcctgtgcccaggttcgtaagtgatttgcacagggatgtagaagaggcctgatgaggcttatccctccagaactcacctctgggctgtatgaaggtcagtggtagagacctgcacagcatgctgtatcgggtactttttggttgctgtgatataatactatgatcaaaagtaactaaagaaaatggggtttattttggccttggggtacagcctgtcatgatggggaagagatggcatggtgccaagagcaggaaacagggacatcacatttcatccacacacagcaagcaggaaaggaggacaggagtcaaggtgaggctgtatcccctcaaagtatgtcatcctcagtgacatacttcagcaaggctcaaccacctctctactttcccaaatagcacttccaaccagggaccaactgttcaaacacatgagtatggagggaacatttctctttcagatcaccacacatatacaagggtcccctgggttcagtcccaagtgtcaccaaggaaacaattcagaactcttgttggcaaagaaggagaggaaggagagaaaaatcatgttaggctttaatccatgttatggggtattaagactgtagaccgacgatgtgtttacaagtggagtctatgggagctgattaccattaggtaagatcatcttagttgaattctgacagtttaaagcaggtacttattttatgtgtgtgggtgttttgcctgtatgtatagtctgtgcaccatgtgccctcctggtgcccatggagaccaatagaggatggcaggtcccctgggactgaaaagttagacttgattatgagccaccatgttggtgttgcaaaccaaacgtgagtcatctggaagagcagacagtgcttctaaccactgaaccctccagcttgtatttcatttttgagagagagagagagagagagagagagagagagaaagagagaggtgccccttgtctccggatatgtgaagccctgtaccctcttgagaatgccagcaagaaagtgggggccttgaacctctagtactgatacctaaatatatcttttccttacaaagttgtttgaccttgggtattttgttatagtaatacaagagatttgcagaagactaattgcctaatgacccaaggagggacgtgaaggttggtggtaagagaggtagttctcatccaagaaaagggagactttctccacagcaggctgcctacctgtgtgcctaccctccaggtggctgtgtggataccaacatcacttccgaagcacggctgtagagagaatttctgtggctctatgaaagagagatcaaggagggagagaatagatttccactgaattagtcattttacaagatgacttctgtttccggcagcaccttgcttatcataatgccaacaacagtatacaacatacagtaataattccttaattcccccagtcctctgttgagaaaacagagatagtggtgttactccaattctgtttagaaatgcacttgttgacgaatgggggtaggctggacacacagttatttgcttcaaatttactttctctgaatttgtttcgcataaaaaaaacagtaatgtgtatgtgtatgtgtatgtgtgtctctgtatgtatgtgtactatctatgtgcaccacgtgtgtgcaggagcccctggaggtcagaagagaatgtcagatccctaggaactggagttgcagaaggacgtgagccctgatatggttgctgggaaccaaacccaggtcctctacaagagctgtaaccattcttatcactgagccaactctccagcatgtgtgtccattgaatgaaaagcattcatgatctcaaaactggatataaactgggtgtgatagtgtacacttgtaatcactcaggaggctgaggcaggagaggtcaagccaaccaaggctatcctgggagagcctgtctcaaagcaaaatgaaagacacagctgttttaaaaagtaattaaactgttgagtgaaagacaagacactggaaactggttttgaatctccataactttgaatcgccgagccagagtctggaataacgttttcctgtccaacttgaaaaatccctggcaattggaaggcagttagggaaatgctcagagacttggacgtagacaggagcgtctgtgctctcagaggcgataaaagccacggggaaaagggtctgtacacctggagccatttaagaagccagacactgagtgcggcaccttagtcagatttggacttcccctgactggctccctggggtgagtcattttgacagtaaaataatcataataatgagctcttgtttactaagataaattcagttactgtacttcactcaactaaaagaaaaaaggtattgagcagaaatttcgggggtatgagtagatctgggggttagaagttctgggctttcacaactatgttttcttcctgcctttcttcctgcctttctttgcatttgtctttttgaaaaaatgttttttttattttattttatatgtatgagtgttttgttcatgtgtatttgttcatgtgtgtcctggagttagaaatggttgtaaactgtcatgtaggtattgggaatcgaagccaggtcctccacaagagcaagtattcttttttttttttttttgtttttgtttttggtttttttttttttttggttttttgagacagagggtttctctgtgtagccctggctgtcctggaactcactctgtagaccaggctggccttgaactcagaaatccacctgcctctgccgcccacgtgctgggattaaaggcgtgcgccaccaacgcccggctaagagcaagtattcttaactactggaccatctccctagcccctgaactctatgttttgaacctcactgtgagtgacagattcccagctgtcgcatctgctgttctttggtggagtttacaattgcagcctaaaacaaattttaaaaatcagaggggaaggaattagggtgaagttgagcaaaacttaaaaaatttcagtcctgagaaacaaatctggaaagatctatagtacaaaatgatgactgcaatcaatatatctatttctgggagtggtggtgtgtgcctttaatgccagcactcaggcagatgaaggtgaatctttgtgagtttgagactcacaaacgcctgatctatgtagcaggttctatacacaggactgcatagtgagatcctgtctcagaaataaaggctgagctttgctgagactttaaagtgtccccagcaaacaaacacacgaacgaatggacatgccagttagcatgaattatctatacatattgtttacagatttccaaactgttgtatcgtatactataagtctgtgcttaaaaaaagagaatacagtttgagcaaattaagaagattgaaaagaggagtgggaggggaaagcccgtctctcaaaagctgggatgccacctaacagccttcagtcaggtgcaaaccaagcatagagctgtaacacctcccccgccccattatgtcaccatgtgactaggtagtcatcttagtttgtgtttggaccatgtacaatattcatacagaatagaacctgcctttaaacaacataggactgcaggctccagcccttcagccttttccagatctgcccccagcaaggttgcacaaaagctggaagctcgctgaactgaagcagctccattaattgaccagccagacaccacaacctctgcatttgtctctgctttcgactccacagagactgggctgtggccatgtccaggcaggggccgatggcctcagtgcttgcccaggtggctcttaggacttggagcacgcttgctcagcaggctgccgggatagctggctcctggccaggggacatgggtgtcactgatgcttttcaggacagaccttcagttaccccagaagtcacccatgaaaccacctggaaagccacagaggccaacaacagaggggcagcctggggtttctgggcaagggaggagcacctgcttccggtctttgtcctttatctcatcgactgtggctccatttacatcctttcaatgattgatggaaaggcctggctactccaaaccatcacagtggctttttgctagcattcgatagtgtctggaaagacagaccgctggacagaagggtctcatttttttcaagaatctgatgacttgacctttcacagaaaccaggcaaggtcttcagcagaccaaatctggaggaacgtcatcgaatctcaagctacgatacagttttgttttgttgtccagctgtaactggatggtttggggacccactgctggatagtatttgcaggaaggatgggggagctgaaaggaggggaaagtgactatggtcatctcgatttagtgctgtaaatgttgaaccaaggtattgaaaaatttatagtttgggaagaaaaccattggagtcacaggaatggtcatgaaataaaatgtccaagcaccaaaaaccttgtacacatctaaacacactcaggcacatcccaatctggtgtgtccccagattggtaaggtctgcatctctccgcatctcctgtaatttgacatacaccacctctggcacttgtcttggtgttcatgtcttggagaagccttaaaaataagaaaggacatcaccttcctcctttaaagaaatacagcaatctgcaggccccacagaatctaaactaggtgtttaatcaggactgcctgagttacaggtgtatgtgcgtatcagccgctagttaaatcaccagcaaactaaaggaattcagacgactccgttgccaaaagaattccttgtgagctcatcatgaggaatggtttgtatatggaaaaccctggaacagaagaaagaaactgttctgcatgaggaatggcgtcttggctctctcttagcatttcctgaactgccaggctatgtggaatctcctgccaggaaaatgtccagaggtaaaaaaaaaaaaaaaagacaagctttaggtttgtttaaagtgtgtgcttcgtgaaagtgtctgagtttctgggtctaaacggttaatcatctgctgcccagggttcccatccctctccagttctgaacacagcgctgtgttttccctctggagtggtgccagtctatggacgttgctaataaggatgggcttcaaaggccctggagctggacttccactccgatgctgagccgggagcgtgaacctctggagtcagcaggattgccgtgaagcttgccatctctccaggagggttttggatcactgtccttcatcccagcaggatcacaaatggaacaggatgccagagagaaagtgaccaagacatggagcaacaagtcaactagaggaggttttgaaaggaaggctaggtgcgtgagatgctgttttgcctagatgagattccacacctgagtccaacctaacagctcactgtgggtgtgggttgagagacagtttggggggcatcaaaggaatctctacaaagtctcttgcttttacacttgtgcattgctcactggtagactttgcctttccccttgttagactgtcactagcgctgacctcagcatccaagtgtctgatgctggctctgtcatccaggctttggtacctcaccacttcatgcctgcagcccaaccacttttaatattccttagtgattcaagtgatgtttgcacttcctactttctgtgttgcttgtgtctgcaatatgccctggcttgtacatgttatagcaagtgggttgaaaggcatgtttgtgtgtgtgtatgtgtgtgtgtgtgtgtgtgtgagagagagagagagagagagagagagagagagagagagccagccctttgtgagatttctgtttaaacctgtacagtttcactggtgtcagttagtaagtagctttggggacttcccttgccaccccaagacacacctgtctcagccaggtctcttgcaccaggtgtgtgtacccagctaagactgaaatgaagatggaagtctttgcagggtgtgtgcagatattactagtttctgtcctaggaagggaaattccaagcatgatagtctcggcgatgattcaggaccatgttgttatcctgcctttaaatttttcctctgtgttccaaagtgagccctacccccaagcccttggatgatcctggagctgtttacatgcgtccccttacacaaatgagctctgtaaacactgactctctgggctgcatcccagtcccactggcttctaaggggggaaaaaacagagggatttctccctagtgcccttctgctgaccttgcctgcccgggaggagagctaactgagggaatgctgacctcactccctaacagcaggatttcctgggacatagagggatccattcttctgcgatctgccatatgaaatctataagctttcacagcagattatggggacaactaatattggttccttttggacttcagcttggggtcaagcaaacacacaaagccatctttatgctccctgaagtcctgaagaccttctacgtcagctgctggcagagggggtggggcagcgaggtggggcacagtctaggaagagtgctggccgcggcaggaaaccgggctgaaaggagatgtaagggctttggtgggaaataaatggcacaatgttgttgacggaaaaagatcttggcaggactgttgttgtgagtgctctgtggcttagaaaggaatttcctacaggctccactaaccattgaaaatgtctctaccttcaggagtccccggcatgttgtagagcctcgctgggggaaatgtcagcgtggaccatgggcgcccaaggtctggacaagcgaggaagtttctttaaggtaaaaggaaactaactggatttgggatctcagctctgctccctctgcgcggcagcctgaggagctgcaggcacccgaagctgcaggctggagcttaaaagcctgctggctagaccagctggggccaggggagcttgcctgtgagcacggtggtgctcagcgggctggggcttttgtggtttaatagttcctcactggctggggtctgggtcagagatgccacacggtgagaccctagaggggctctgaagtggtgtgctgttcaggctttttaagctagggaatttcaggatgaaagctggactttgatttccaaaaaattaatggtgtgagaccagtgtattcgtctgactgaatcattaaagagcagaagaaaaagcaaagcaaagcaaaacaatgattccaggacctcactttaggctgatcaaatgttagtttctcaaacactcaaaggtttcttatggtggggcaaggggaagacaagattaaagtcatacagcttgtctgtttcacgtgggcattgctggggctaaagtaactttctggtttaatgagagatttttttttaaggttattttatatggagtgcgtatgtttaagatttgatggccatttctaatgtgaacttgcaaattagttttccttttgtggctttttgacctgtttattcatatcctcaaataaatgcaaatttattttggaaaatcctgactcacacctcaccccctgccctggggattggggggggggggaatagactaaaggaagttaaatgtgcacatgaagtgtattgcagtcaggtgtcccaaacaatggtccttgtccccagaggaggcgcaccaaggaaaccttattgctttattactgagaaggggggtggggggagtgcttgtggttagtaaatccaaagcccttaagtgttcataagtatgtatgtgtatctgtgtatgtatgtgtatctgtgttttctatttccaaagagattgagactgatcatatgtcagaggttgaccctagaaaatccatcagaaaccttgttgatagagcaagctttattgagcttattgctgaaacgagggccaagagtctcatcagtgtctaagccagggacccctgggaggtgcgttggtaggttttggttgctgagtcccaagtcctttaagctgagttctccaaagcagggtgtaactggattttagtgaagcttgatagtaagcaacatctctgattgggttttagcgaggcgtgggagggagtgtctcagaactggtagacagaggtgagtcttgttgagtaaaccattgactagcatgctgctctcccaagtgagcaaacttttgagacttcctgcagcaaacagaaaggctattgactgactcatagccttaaggctatggacaggaagatcctggaagaatcaagtaatgttgacacaaatgacctccgctctccgtgcaggtcgttaagctgtgtctacataactaatctcaatcctcagcgaggtttctcagctttcatcaaacctgtgtaaacgggagggaggagcttcatcctccggtttcttgggggaccaggagctgaagcccggagccctcgattgtatcttacgctgagatatgcgtgcaaaaacaccatctcaaacactgctttatcccaaggcatggcctaaattagcctaaatattggttagtccttaattaccaccttaggatgtacagggaaccctgcggaatcatagcttacatagtagttagacttcaaagtcagggcgaaagaaaatagagtgtggtcagaactgagtttgaaaatttctaaagaagatgccctgttggactccatggaccgtccaccctgacgtcagttttggtcagttgttttggggttttttttatttgtttgtttgctttgttgttgttgttgttgttgttgtttttccagtcctgttttcgttttcagctttcagtgaagcagcaggcataggaatcggcttgtaatgctgtcttaggccatgtgaaggagtcacctggggaaaagatgaaagctagctaaaccctgtgagttctgtttcttgacctctcatgggtcagagccccctttggaaaattctggcaaaggagtctgaaccatttactattatctatatgtttgacagagcttaaattatattctctaagttagatggtcatgtcaatgatagtcccttttatgtagtctcacccccccccttgtgttgatggacattgttgttcagtggtctgcaccagcattaggcatggagctatctgcatggataaagtaatgccctttgaacacttattaatagcaaactggatccagtggcccatgtaacttgcccctcaggacatcgaggaccatggactcttttgtcaggcttcatcttatttagaatcatgtcttttaagcacctgtgattccaccaagtcctgacccagaccagctagagaaaacccaaaagccaccctggcttcgtgaaacttctagtctggtaacaaagaaagataactaccaaatcagcccagaaccacagtatcatcatcatagaagacaacaggccctaggattcggagtagatggggcctcagagaataggcagcctaacctggggctccagaaaaattgctactacacttgacagctgagattggaaggtgggtgttgaggtttggtcttttgctatgtattgtaatgttaaatactggcttccaaaggcctggttgcctccagggactagagaatctgtacatattcaaagtaatgttatgtgaccttgctccttaatttaaaactattggttgaataaagatgctgatagcctataactgggcagaagagaggtaggtggagtttagcggcttggggtctgaggaagtgaaggggagaaattagagagaagaaggtggggagagaaaaagacacagtgagataggtgagtcatgaaaacatggctgtgagggttgaccagttggagtaagagtggcccaagtagaacaaggctagtcatatctcaggattattggtagggaagtagacagaataacatgagtgttgatatcatctgcccagctctagtactttaaaggcttataaatataaaggttgtgtgtcatttatctgggaactggatgatcaaaggtggggtagaaaccctcaattgagagtacgtatttactacaacaggtaggagtggagcttaattcagaatgatacctacgcagtggcaaagcacttcttctcagacatcataaaagatgaggagtcttgactcgtaactgaacttcacattaggcttatcatccttcatggttattaatgctctgtggtttttgtgcagagctcattcattggaagacattcagcaaccttttcttcatcactactctccctgcccagtgtgtgctctaaagcagagttgctaaccaccagtggcaagctttgatttgtggtttcttggtttctcacgtgtcctgggtcagggaagcaagttaggttagaagacatggggcgcatggaaaagacccagatggtccaagcatcctggagtaactgtggatgcccttggtcatggttcctgtagggtcacatcctggaagccacataaatcctactctggatacacatgttttccagttgttcacagcatcgtgattcattttccttagctacctctgtaaaaaaaaaaaaaaaaacaaaaacaaaaaactaaaaaacaaaactaaaaaacaaaatactcttttcctgctctataaggccagtatgcaaacatggggagatggagggacgtggaaccctaaacagggtaacgtgctatctgtagccaggtgatagatatgtacaccgactgcaaccacatttgaagggtgaattggatgaaagagtttatatatgaaagatattactccagaacatgctccagttttagcaatgtgcatgttcagtcatcatgagccttcctttttgaatctcacagcttcctccaagctgcctgtacaattcagtgaccctgtgctgacaggtctttcacaaatccccaaagtttattcccttcttcctcccactgcacctaccatctgctgaggacctctgtaggaaacctcagaagtcggttcaagataccccatgaccaaatgctcagcacagaggagacaaaaggcagggataagggacaaagacagatgatacaggaagagggaggagagaaggagaacagtggaaaggggagaaaaggggcaaaggagaggggtaagaggtatatgtgctgggggggaagggaggacaaatgactgtctctggatagagaggagacagacatggcccataggaaaaatgacagtttaaaaggggaaaacccgtgttaggatgaggtacttaattttaattgggcatgttaattaggtgagctaaagggggcttttgattgctggacttcagtactttggatagctgggccttggttgtcagcctcaagaggaggaagtggccaaataagggaataggccttgggggctcacttcaggaatgtaatctaatggtttttagcaaagcagaaggaatggggaagaagggacaaggtctgccagggctgtgtgtgccaggcctgggctggctagagtcccttcatagatgatactcccatccagctacactaccaccaaacccggtccattgatataagcgatctacctcagatccagtcagcaggcttcgtcttcatattctaggactatcaggctctagctgcctttccctcaagtctctaccacctgaggccaaacctttgtctgccagcctccaaggtttgccctcttatcacctacccctcacctctgcctcggctatccttccaggctaggtagaactaccctgttcactgttggcagaactcacacaggctaaatgaggatctgccttcacttgtgcctgaaataaaattgcagtagaaatgatggaaaaagctgggtgcagtgtcatacactcatgattccagggatggtggccagctagctgaacaagtttcatgtgtgttcgcgcgcgcgcgcacacacacacacacacacacaccattgtacacatatgtagaaatggcatgtagaaagtcatagctgtggtcccaacatagttccaggatttaaacttcactacaccacttggttccatcagggaagtttttcctattcttctgtagtatgactcgggccctaggtggaagttcttcactctcctagtatagaatgatgcagacagtgctgccacccacatttataggaatgcctttctgcttcttggactgacccacccttgcctgcctggacttgtgtgtagagtccccctatcctaagtggaacttcttcgcctgcctgagcctaagggatgcggtgaaggttgatcttaatgaaccaggagggaaaggtgtttggatcacagagaccctgctcactttgccttacaagtgctgagaacctctgggagcatagcatacgggtagagttgcttgagattctgggttcattcaagggccttaacccagcagggacagcatgtcagagatccttctgtgtggttgctttgcatggtttagacaatctggtgtgttgagcttgtctgttagaatctggaaacctgcagttagttacatatcagagaaaccacaggagagctctctggcatggtaaaggatgggggtgtttggcttaatctggctctactgactgggtgatggttcatttcatttcaactgaattcccttggctgtcagtctttgctggactcctgaagcggtcttcagtcttcagagcagagcctcagtcatccagaacaggatgagcctcactgcagcttggacatcagtggttctccttgcatttgagttctcagaatcacctttgttatggaagtgcgtttcacgtgcacaaccaaaggtcaagtcactgttgcagaacggtagaaaggtatggcggaggaatgaaaaatgacaggtagaaccctaaatcccattttaaccaaattcaatttagcgaagaatcctgttgtggatctgtggacagttaaaagccatagagatgagtgtggctgtctctcctccttccttattgtccccaagaatgtgagcatcatctgccaatggccagctcactcagatggtctgtcagcaaacggccccaaatactttatgatggccacagagacgattataaatgtagtcagggtgacaagcagagtcacggtttatttgtgatgttgcagagcacccctgctttggcatttgcctgtgccttctatttttcataaatacatttttgcccacagatagtgactgatagacaaaggctagagaaggccgttgttccctggagacatatgtgctacagatgtaatttaagatttttctgtagtcacataaaaaatgattggtcttttgttgttgttgttttttcttttaaaagtaaaacacaagtaaagttaatttcaaaaggcaagatttatttgtatctcatgaaagcaaaagttgtaaataagaatttttcatttttgtcctgtattttaaatttgcaatagtatattttagcatgtgcagcatgaacatgtgccgaaatacatttttaaaagccccctcgtgttacacttgaacgtgtctcagttcgtatcagctatatcttgatgttcagcagccatatgcggctggtagccaccaccctggacagcaaagagttaatgtttatctggcataaacccctccttttacaggtggggaaccagcctactactggataaggtagaacatgggagtccacctggcctgactctgctctgaggtatataacaatcccggcgagagaaaaggcagcctaagggagtgggtcccaagaaatggctgctacccccaggagttttatactcaaggatgatgccagccagaaggggagatttcacacagttctgagggagctgggacagtgatgtttctcggataaggaagaccacaccttgaccaggaccatgtggtccttactctttggttaagcataagcctcatgtcatgtcatacatggtcactggaccccttcattcttacctcttcccgatgttcttgacatcagtgaatgcctctccttgcttcgttttctcttttaccattcaattgaggacactggctgagctctgtagggtcttcaggactcaagcttcgacccctgggaccctaggaccctgggatcctggtggaagtatttccacatcacatgaccctggcagtctggctgcttttgcaacttttctggattgcctgcccaagaaataccatatagagaggtcaccagagacagtggccttctctagagatgacactagtctgccttttaggtgtatggacaggcctcttgccagtgatttcaacacctttatcccaggccagcccccaggacatgcctttcaaggagtaacacgagcttttgagatagcagatgctgtgtttgctaaaagcaacagtacaggtcaagtgggtttgtaggtcagtttccagcaaactgtagccaacagtgtctaaagttgaatgttgcctgcaggtctccatgtttgctccaggggagtctaatgtttttaagcaaaataaaaccttgaactgcctagtgacacatatctaatcctagcagaagggtctcttgagtacacaagttcaagaacagcatgggtaatatagacccagtcttaaaaaaaaaatcaataacaaggctcagaggtatagcggcagacatctatgagatctaagttacttgtgaaggtgagacagggagactgcttgtgccacagattcaggaccaggagaaaaggaaagaggtgagagacagatgatctagggtccctttctcctgtggaagatggagtgagtgatgtcaccttcccacctgggttgtaaaatgaatcattccaatgtgtgctctgaagaggtccatcaatgcatggctatggaagctgtggtgttactgatgctatctgacactccaccatgaatacaagtctatgccaggagaggaggccattcagttatgtgtgcggtgtgtgtcttggtttctctttcattttagacccatgctgcaagctacctggataatctgggattgcttgctcttcgaattagttacatagaggcactcctaatgtttgtgctctgtatttccagattcagagagcttatctcagagtctcagagaaggtgcaggtgactgactgctggaagctggttcagtcctagccagagttttggcagccacaacttgcatggagaagctactggcctctagtggtcagagcccagaggtgccgccaaacttcctacagcacccaggaccatttaccagccctaaattttagtagtgctgaggtggagagatcctgatgcgcattgtaaattaggagacaatccttgcctggggtttctctagctggctctgcatccggccttttagaaacaaaggaaaggaaaggaagaaagaatagtcatgtatttatcaccctctagccaactgcttgtccagagcagagattgacctactgaccttttgttgcatcccgtggctaatccctggcctaaaacaccaagttttcagttcattagctgagtggatgaaaaatgcgcagtgtgtatgtgcagaggtttacatacaagatttgggtatccacatggtatggaatcagccctcatgatggcagggtgagtcctggactttaagtgaccagtacccaggatgttccatagcagttagagaaacctgggcttgaaggaggagaggaagtgcatggctccctgtgtggttgctgggaaaccttcttggggaggtgaaaggtagtttgaactgtctgggaggaaaggacacaaaagagcctttctaaactcctggagcagtgtctgaggctctgcatagaatcgggagtcagggcagcagggaaatgaaggaaggagaaagatggggcggctttgcagctgggtgagatgttgagattctattcttagtacagttgagaactgaggaaggctatgaaggtggaggacatagcaatacccaagtgccgtctttatagaaaccaccccaaaaactgaagtataactcagtatcttcctgaatttcttcagaagaccccggccatttgaaagcagcctctgggcctctccacacttggttcttgtgtgcctggaagatgttgccagccttcactcccattttccatcagttgttcttcacagagcagatcaccgtgatctggagagctttctttctgggtttcttctgtgcagatttaaaatctgttccatagaactcatttttccatttggagtataacaaaggaggaatattgaaaactcccgttttttttctttaagattgtcccagagctggggtgcatcccagagcagtggtgagactcattcgtggaccgtctgattagcatgtattgagcccgcctcttgaaaaaaatgagcgtcagactcactatgtagctgagaatgatgttcaccttccaatccttctgcctcttcctcctgagtactgggatgtcagacgtgtgccaccctatggtgttggggatcaaacccagagcttcctgtgtaatagcaaacattccattacctcagctccatccccaggcagttagccaatacttaaaataataatggtaacttcgtgaagcacagtgtgtggtatggaagagaagcaacaggagagagaacagagttttggcgacagtcaaatgcaccccgcaaaaataaagatctgccaatcaacttctatttgtatatagctacacctactggttttgaattgcctgggtttcctccagatagttgcccgactgaatagcatcaccttcattgccttcaaagcctgaaacatttacccttgatggagaaagttcacccgacattgacatggggagatgactgcatgtttctgaattctcaaaggcaattcttttcttgcttttctttgtttgtttgtttgtttgtttgtttgtggggtattttattttgcttttagacaagttatctctagctagccaaggctgacttcaattctgctctggttccctgaatcaaaggtagtggtgtgtcacatcacaaatgaacaaacacgttttgctagggatagctcagcagttagaacttgctgctctcccagaggacctgggttcaattcccaacacccacaagacaggctcggagctttccttaaccccagtttctagggatttgatgccctctcctggcctttatgggtaccaggcattaaagtggtacacagacatacttgaaggtaaaacaaacacattctctctctctctgtttctctctgtctctctctgtctctgtctgtctgtctctctctctctctctcacacacacacacacacacacatacacacacacacacacaaacctgccagggctactgatctgtcaaaggaccagaaagttagggtagagctagctgtggagcccgggcgctgaggacgggtcccttttcttcctgagccacactccctataggttgtttgaaattgctgaagtgcgttcgcccagaagcttacaggatccagatgacaacagaagcaagcaaagccaacccagcccaaaggagctcggtaggagctgagatgtggcctcagaatggaggacgataatgaatgaaggggctatggtgaatgagacagtacaagttctatctaagggaagccatatgtccctcctccaaatccaaattgtcaaagtgaaggcataatgcatgttccaatagcaaactccagtttccctgggtcttcttgtagactccataatccataagagccaaaaaattagtatatcacttctgagaagatgaataatagatggcgtggaaaactttctgttgatgtttgtgacactttgagagctaagaccaaggtcaaaaggggcatgccaagggctgggagtattcctcatctgtggacttcaatccacagcaaggcactcaagcaaacaaacacaggaaaaaccaaaaagagaccagagaggcaagtatggggcttttgggtaacattgtcaccgtcttggctcttggtgactttaagttgaagaactagtatgctagatgatcaagggacatccgagacacccccagccagtggcttccatgttcattgttgcatgcctgtccaagaaaaacaaggaaacaacggtttatttatttacagtgttttgcccacatgtacacctgcacaccaaaagagggcatcagatcccattacagatggttgtgagccacaatgtggttactgggaactgaactcaggacctctggaagagcaatcagtgctctcaacagcagagccatctctccagccccaacatcttttttatttaaatgttaaatagtcttcattatgacacacaaggccctacaggccaccccagaatggcctctgatgtatgacattggagctgctgtgactgacagcttcctggggaagggctgttcccaggaactgcactaggttctcagcaaagagataaacttcctggcttctcaggcttccagacaagccctcagccctggggcagagcttctgggtgtgtctcatatcaccagatagtaggacaagcccaggaagtgcccaccagtcagagaggctatgtagattggggagtctgagctggagaggaagaaggtttgtgcagcctctggtttgaggcccgtggggattttctcaccttccacaatcccacatcagcttttccaaagccagaacccagtgctacttcaatgcctcagagccgcatgtggcctgcttcatgggaaggcctcagcctggcccatcattcccgactgcactgtttacaccacgcactcagagcctcagttccttcaactctaaggtgggattgccaatggtctctgctccacagtgcttgaggggacatgtgacttgagtggggtagtggatcgtgccttctgtacacatagcctcacatgaaggggcgctgttgtcaattgaagttgggtaacccagctagcctcaaactctcagacagtctcttgcctcagcctcctgagtaccacactgattacagatgagagcaacaacgtctagcaatggtttactacttagcagagagtttttaggacatgcctagttttaaatgacttttatctctgttgcttcaagaagtgtttgatgatgatgatgatgaagacgacgatgatgatgatgatgttgttgttgagacagggccttatttgatgcaggctggctttgaactcaatgtatttgaggatgaccttgaattgatgtcttcctgcttccacctccggagtgctgagattacaggccagagctgccacacctagtatatgtggtgctggggatgaattcacagctttgtggttgttagacaagcaccctagaactgagctacatcctgagacctcaagcagagtctgttttttgtttgtttgttgtgttgttgttgttgttgagatattttgatttgatttgatttgtctctgagataaagtctgcctcaaaagcccaaactagttttgaaatcactgggcagcccaggatggcctcccaacatctgtcaacttcctaggaatgacaatggagtgccactttgcccagctcaagatgtactatgtagccttcctgtgtttgtgacacggagttcctgagatgtccctaaagtcaggacagtgtaatcctgtctccacccatcacttttgcagtactgtgacatcaaggctgtgtgagcgtcaacagagaaacactgtgtcctcgtctatgtggaggatcttctcaaaagatttgaataacagggagaggtgactaacactaaccctggggtaaatgtgtgctctgaggaaaggcttatccccagcaggcagcctcatggcggcccaacagcggcaggcagcccagagacatctttattcacttgttttccagttcagccttctagttggaattttcaagacagactagagtggtggtaatcccaggagttggaaaactgccttccactctgaaattgtgactgtgtgctgcagatctactgttctcgttgggaaaagctgactcaggggacaaacgatggtaattgcttataggggtctatctacccttggggtctctgtgaccatctactgagggcgagaaagccagtgcaccccgcaccagagcagtgtggctttggcttaccagtctcccatcttggatgtcccctgccatgtttcccaagcccacattcaccatgcccttttctgttctacccctaaggtcaggtcaagtgcttagtgacctcaaactcggaggagtgtgggttccactgtcactatttatacagaactaaactttaactttttttttttttactctttacttttgtgtgcatggatgtgtggagaccggaagttggcatccagtgtcttctattgcttttcaacatcagtatcattatcatcatcatcatcatcattattttggttttttttttttttcaagacaggattttcctgtgaagccttggctgtcctggaactctcatgctgacctcaaactcacagagattctcccacttctgcctctcaaatgctggaattaaattcatgcactattctacctggctcaagttcatcttattttattattttatttttaaagacaacgtctcactatgtagtcttgtctgtctttgaactcactatgtagcccaggctagccccagattcctagagatcctcctgcctctgcctccaaaaggctgggattaaatgtgtgcagcaccatgcctggctctaccttttttttgaaatagggtcctaattgaaccaaattatcagacccattggcagtgagcctgacccctcacctgtatccatcctcttctctccagctcccatcactgggactgcaggtcccagcttcacaccaagcttgtggatggatggatggatggatggatggatggatgttggggatctgagctcatggtcactcagccagcgctttacccactgaaccacctttcccgtccactaaatgaaattctacttcttctcaagtgacgtgaaagttaacaatatcctataatggaaagcccttcctccctttctggacttattgacagctaaatcctctgggtgagttcagtaaatacagatggttttgctgggcgtggcggtgccacataaagtagagccaggcatggtggtgcatgcctttagtaccagtgctttggagacagaggcaggggaatctctgggaatctgaggctagcctgggctacatagtgagttccaggacagccaagactacatagtaagacattgtcttttaaaaaaatggataaagtaaatctaagtatttgagaggtagaggcaggaatatcaggatatatatatatatatgaaggtatgtgtatttgtggtacatgtgtgcatgtgaatgtgtatgtgtgcatgtgtatgagtgtatgtgttactgtgtatgtgtgcttgtgtatgagtgtgtgtgttactgtgtatgtgtgcttgtgtatgagtgtgtgtgttactgtgtatgtgtgcttgtgtatgagtgtgtgtgttactgtgtatgtgtatataatatgtgaatgtaaatgtgtacagtggtatatatgttacatgtgcatgtgtcagtgtataaacatgggggtatactcacacacactcnnnnnnnnnnnnnnnnnnnnctttggaggcagaggcaggggaatctctgggaatctggggctagcctgggctacatagtgagttccaggacagccaagactacatagtaagacattgtcttttaaaaaaatggataaagtaaatctaagcatttgagaggtagaggcaggaatatcaggagttcaaggccatcctccatgattacacagtgaatttgagaccagctgtcacaaacaaaacaaaacaattgcatatatgtgtatatttgtatgtatgtgtctatatatatctcatgtgtgtatgtgaatatatatacacacacacacacatatatatatatatgtatatatatgaatgtatgtgtatttgtggtacatgtgtgcatgtgaatgtgtatgtgtgcatgtgtatgagtgtatgtgttactgtgtatgtgtgcttgtgtatgagtgtgtgtgttactgtgtatgtgtatataatatgtgaatgtaaatgtgtacagtggtatatatgttacatgtgcatgtgtcagtgtataaacatggggtatactcacacacactcctgtgtgctgatgctcccgcactcagtggctgtccccaccagtggcatgggctgactttagctgaggccttggtcccacaaaatgctggatctatttattatactagctttcttcatttttccaccaaactaccattgcctgttaccccttttataggtaagcaaacagaggcatgggccagttacagtcttgccccaggggtcgcacaggaacgagagccagagaagacttcataccatagctatgggtccagatttcattagggagctaaaggttagcctttccttggaacaagaagtcctgcctgtggccactggcactggtccccatgcccaggaactgccagtctgagcaggaatgggtgcggcccccagagcagctggctacacttccgctgtgccaagggtacattattacagattttgagggcaaggaacagaactgacagaactttccagaaaagagctctcccaacaggaatgtgcaaagtgagttttggagagccatttgaaatcaaagaagggattgccggcagcctggtgtcattcctgggtgcactgttagaagttttcatttcctcagaggggagtggtttttactgatagagttttaagtttcgtaaaagttgccatcgtagcaggaggattcctgtaaagccattcattaccctcgttccagctccctaatcacttacacgtgtccccacttgctctctcactgtctctcttcctaagtccacaagactgcattggtgccagtgtgcatgagtgtgtgtgtgtgtgtgtgatttcctctttctataggcgttatagtcacaagtagcatattttctgggtcacttgagagtatactggaagaaccccctaagtatgtacccctaaatcctgagaacattgatagctatctattcatctctctctctgtctgtctctctgtctctgtctctgtctctgtctctgtctctctctctctctctctctctctcgtattttgaggcaaggtgtcgctgtgaacctaggctggccttggactcaaagtcgccctgccctgcttctagatttctgggaacacaggtttatgccatcacatttggctataaattttgttatttcagcacagtccacgatgaaaaccaaaaaacgtaaacgttgacctgagaatcttctgtagcccattccctgggtttgttgatggctcagctatgtcctttaaggaacttcttttcccaccttcctagatccagtcaggatctcccattgtcacaagtctttagtctccaaatgattctgctgcatttgtcctgacaattccatgtttcatttcctcctgaaatgccatgcgtcatagggaggactcccatcagtgttcagtctaatgaattttcaccaagtccatatacttggtactgattttaaatggtgcttatgtgtgaagccaagaaataatgctgtgactataagaatggctgattctcatgagtgagtccaagatctgggggcatggctcagtgtcagcacacttcccagtatgtgcaaggcccagggttccatctcctatgtcaccagcatgctgggtaatcttcagtgtcaacatgactggatttagaatcattaggagactgaagcacgcctgtctatgaaggcatttccagagcatgaactctagtgggaaggtctaacttagcaatgagtggcaccactccatggactgggtgggctggaagcacaggtcgattgaaaataggacaagggataactgaacacaggcctccacttccaccagtccatgcctgcttcctgcttcctagtttgtcctgatgtgaatggctgtctccaccatgcctttccaacagtctgacctctccagaactgtgagtcacaactaatccttccttctacaaagtgtttctttcaagcattttgatcacagtggtaatagaataatcaatacaactgaaaactaaacaaacaaacaaacaaacaaacaaacaaaaatctcacgaatgagcccagtatctggatgtgcagtaagccatggccttgggaccacacaagagaagtagaccatgagccgggcgtggtagtgcacgcctttaatcccagaactcgggaggcagaggcaggtgaatctctgagttcgaggccagtctggtcttcaaagtgagttccaggacagccagggctacagagacaaaccctgtctcaaaaaaaaaaaaaaaaaaaagagaagtagaccatagctcccattgaaggactccaaggtcttcctttgcttgtattcctagccgtctggacgtcaggatttgtttttaaggctattattccattgtgtgcatatgccacattttatttatgtgttcttccatccatccggggaccttgggcttggcagttatgcatagtgagattatacacaggagctggattcctatagcagcttgctcctatttccgacttaccactcgacgtgtttcgatagctagatcaagctgagcattaaaaacagattccaaggctcgatctcaacttcaagagtcttcctcaactatgtgtcaactagattcagacaaaaggcatctggtcagagaaaatgtgctctgctggagcaaaccgctacgagccagataagacaggggctccccacttttctccataaacacaaagagagaggggtggtgtttgagcttgtctagtttggtcatctctgtcacatcaaatgggccctcttgggatatctcagtccagcttctcgattgcagaaggctggtccacattagaaagatcctggcattctcaggacgatggtaatccctcaccaccccaccgactgagcagcagggccatgctttactgtcctggctagttgataccatcaggtacgggaaagcatttagttcccagaatctgagcgtgtcccacacagagatgacctcatcccctgtgcaaagaaccagtgacagtgcagtgggggaggggccgcttcacacttggactactttaggccttcatgtcagatgacattcggtgtccccaccattcagaagctggaactgtgttattatgattgtttctttaaaagtgaatctcaagccgggcgtggtggcacacacctttaatcccagcactcaggaggcagaggcaggcagatttttgagttcgaggccagcctggtttacagagtgagttccaggacagccaggactatacagagaaaccctgtctcgaaaaaccaaaaaaaaaaaaaaaaaaaaaaaaaaaaaaaagtgagtctctacagcatgggtttgtcaacaagcaaacaagcatctatgccgtagcaatagcaagcccacaaacaagacaaacaaaacccacaaacaaaagactactgtggtgtctggttttgttattgtttgaatcgtaggtaagtgtgtgtcccataaaatttgtaactatagccatttttaaacgtctacttccttggcattaagtacatttaaattattgtgcaaccgtcaccacccttcagctcccaaactcttttcatcttgcaaaactgaaactatcctcaccaaatagtcagcggtttcctctcctctttgttaccggcattctctctgctgctgtgaagatgacagctttaggttcctcctgtgagtgggctcgagacatgtatccttctctgactaactagtttcatctagcaaaatatcttcaagatctatccaatgttgtctcctgcatcagagtgtccttccttactcaggattaataatagccttcggtcatcacaccatacttaacccattttcccgtgtgtagcgccagcatttctgagagccacaaacacttccactgttcctccacagttgacagtgtatttttaaagactgctgctcaagtctcttgccctgaatgggaaaattaagtctctaattaaggagcccactcacttacaagaaacacgaccagagtgtgttgcggtgagcctgtgacaggactgacattgaatctcagtctctattttgaaatgaaaacctcaatgtctgctgtctgagagcgatgaactacttaggaagcatgccagggattcagggacctgggatgagattctagaagcttccatgttgctttccatgatgactacactaagccatgccgaggccaataagaggggtacattctctagggccaggccaataagaggggtacattctctagggccaggacagctgcccttgttttggggggaaacgattgttttctctctcatggccaaactcattttgattcttatttccctgatgattaatgatggtaaaccttgttctcggatgcccattgaccatctgtatacagtagtttatgggcatatctattttggtcccttgcttatatttttaaaataatggttctgggggctgttgagttatttgagtttcttatattatctgtctatacaccttttaccatattcaaaattcagatgcttctcatttcttttgctgggcagaggcttttagtttggtataacccttttggggaatttgtgtgtgtgtgtgtgtgtgtgtgtgtatgtatatatatatatatatatatatttgcctttgttgtctttgagattttgtacaaaaatatgtgtgacccaaccaatatgatggagaagtgtcctatgctatcatctaatagcttcatagatttggttcttatgtttaagtctttgatcaattttaggtcatttttacatacagttagagctagaggtctggtttcacccttgagcatgtagacagacatccagttttctcagcatcattccttaaagaaaccaccttttgccactcacaaggtctgttgtttgcatactagtcaaaaatcaacattttctatagagtgggctttatataactggcctatgttactgtttttatcaacagtgccatactgttttgatttctagagctttgtagactattctgaagtcagtttgtctgatgattccaacttcgttcttcatgttcaagactgctttggttattcagtgaatcctgtgctttcaaataaattttaagattgtcttttttccattattaagaaaaatgccattgggattttaatacagattgccttgaattggtggaatactttggatggtgttagtaagtttcacatctcagtgattcatcccctgaggttgctgatcatattcatgaaaatgagaataaccgggctgtaatttgcttatagtgcaaattcccttctcagagccctcccccccatcccttctctaaactgagaatatgttgtcaaaaaatatgatgattctgggcttacaaaaaacatctccatgttgcaaaatgtccatcctgatgttgcaagttgcaaattcatgcctccgatctagttcttcctttttgaacatttgatctattcttcttattactattcttattagaaacccaagccacaagtactgtggctagcgtccccagggacactaagtgcatttcactgtgattctggtaggcagcacccccgaaagatgatcatcaatagagagccttcggccagcaggtctggtggacccagcatactctgttccctgccccaagtgcacactgctcaaccagttcactctgcatccagggcagttttatgtaatcatgttgaacaggttagcaccatggatgctcccaagtgtcactgaagcggtgacttctttaaggaagtcatccagcgtcacattgtcacatcccatgttactctgcctgagtaaggaaacctctggggaaatgatactttgctcatagacgctgatgcttagtgagtttgaaattatagggatttggtgtgggctggggagaagcaacaaggcacaaggaaaattatagagcttgcttgtattttttaactaggaaaaaaaaataccttccacataactaatgcttggaataaagaatgcgactccatattaaagtcaaccctggtgtgtaactgagatttatttagaaggaagggaggagaaggaagaaaggaaggaaggaaggaaggaaggaaggaaggaaggaaggaaggaaggaaggaaggaaggaaggaaggaaggaaaacatagcctagagttacatgtggtggtacaaatctgtggtctccacactcaggaagctaggatataagcatcccaaattccagggcagcctgggctgcttgggaagtctgaaggagcctggtttctataatgagaccttgtccaggagagataggtgaccttggcagtgactagtaactagcttcccagctccagggaagggaggaagatgactcactacctcagccacggctgttgacagaacaccatagactgtttatcagggtctgcaccaatacagggacctaatgtttccatttgcataaggcagaactaagctcctgtcacaaataaccgagcccaggggcccagaaaacatgacagctacttaatcctctgttcttcacagcaggcccactatgttccactcactgaattagtcttctgctaatgaagatagctgggttttttaaaatgtaatttgttgttattttaagcacattggtgttttgattgcaggtatgtctgtatgaggtttttgatccccctggaacaggagttgcagactacagacgttgtgagctgccatgtgggtgctgggaattgaaccctggtcctttggaagagtggccagtgctcttaactgctgagccatttctccagccccttttttttcctttgagaggaaaaaaagtgaatcaatttagaagtttttacaaaggtaaaaatgggaaaaggccgttgcctgtaaggtgttgtgcctacagtaattccaatgtaaatgggcccagagaacaccagaaaaaaagcataaaagcctggccaggtttttgctttgtctatttataattctattttattgcatcattacacacacatgcacacacacgcacatactttatatatatataggtgactcactatagtcatatatatatgattgtagtggactcagaggacacatactgtctttcagcatcttcatcttaataacacacaccagattcaccatatgtaggctgcacagtattccactgtcttgctgtatctcactgtttacccacagttgctagacatctagtcctttttccatggttcagtgttataaattgtcctgctgaaaacagtctttcacatgtctatttctttgggtcagttcagtgagtcggaaacactaaatctgataggtttcatatttaaaatgatgacctgtgtatttgggtggctctccagaaagagtgagtcagtcattccttttcctcttgtgtgtgaagaaaccccactacagacagctactctgtaggaagtttaaaaaaaattagtaaaggaagtgagtgtgaccccaaacttagggaaggcgcaatgggcagctggggacactagggttgagttggaagggagcatcagaggcccactcacccactcagccttcaggagactgaagtcttcagaatttaagtgacaccccctaataagccatccctgcaccaagaccaagactgctcgctcagctgataaacctttcagaataaataatcccaaagtccagggctaacttcagcgaagtgaagctgaacttcgtcccccaaggtttgtgtgttagagatgagttcccccattgcaatggtgatgaagcatgaccataaggaggtactgaggtctctgtggctcttccctggagaatgtgttcagactgtcatcatgggagtggcttgcttacctggaggataggctctggagaaaggatcgctgtgaccgccttcctctctgacacacgtctgcacctccatggaatggcttagcatagcctgtgctcagtccaaagcctgtgctcagtgcatagcctgtgctcagtgcatagcctgtgttcagtgcatagcctgtgctcagtgcaggtcctggacttcctgcacgccagaattgtaagaaataaacctgttgtttataaatcaccccaacctcaggtactctgttataacagcataaaacagtatgttgcagattattttttctcactagtgagaaaatcaatagctttttgaaaagacttatattatgtgtttaagtgttaggccttatgtgtatgtctgtatactctctgtgtgtgtgtgtgtgtgtgtgtgtgtgtnnnnnnnnnnnnnnnnnnnngcccatactgtttggaagagggtgttggatcccttagaactgaagttttgggtggtcatgagtcactatgtggctgtaaaatccaggtcaccttcaagagcagcaagtgttcttaactgctgagccatctctccagccccagatcaacagctttgttttgttttgttttgttttgttttgttttgtttgtttgttttttcgagacaaggtttctctgtgtagccctggctgtcctggaactcactttgtagaccaggctgacctcgaactcagaaatccacctgcctctgcctcccaagtgctgggattaaaggcgtgagccaccaccgcccggccagatcaacagctttaagaactgtttccaagtagcagaaactattaaatgaagagtcagtggaagaccagggtcatagtgtcttactgcacttgggagactggggcaggatgatcttgagttagaggctagcctgggctaagcctctaagaccttgtctcaaaaacaaacaaaaatcaaccacataacacatataaaaggcaaatataatcagtgcatgaaaaaataccccccctttcttcacaggttttgtcccaccccactttgcccctttcttattcctgagccctcttcctcccctccctacttcttcctctttcctcccttcctctctcttccttatttccttgcttccttttgtccttttctctctgagacattatatcccaggctggcctctaagttgtaattctcctgcctcagcctccagagtgctggaattacaggcatgaatcaactgtactgtctttttttttttttaaagatttatttatttattatatctaagtacaactgtagctgtctttagacactccagaagagggcgtcagatcttgttacagatggttgtgagccaccatgtggttgctgggatttgaactccggaccttcggaagagcagtcgggtgctcttacccattgagccatctcaccagctccaactgtactgttcttaagaacagcattttgaactggttttaacatcctctgcaaggcagctatctaccaggattgatttaacaattatttaaccagtgattatctaacatttatttggcccataaacagcacaactttatacagttcaacctaatgcttaaagacatataagaaaataaaaaaacaaaaacaaattttatgatgttctgttttctactaaacaaatcctgggtggtttttggatcgttcccaagctagaatctggttttatagtctggggctttgtccaaagagtcaaacaaattgatattccaggtggcaccgagtttggcttgttgatgcccagtggtaactctgtgtgtgtttattaactttgttatttattttatgtgtatgaccgttttgcttacatgtccatctgcatatcactcatatcactagcagtacccacagaggccagtagagggcatcagatcccctagaactgaagttacaaacagtctcgagctgtgagtgcttactcccacctactagagaagcagcttgtgttcctaaccactgagctgcatctccagccccaccccacccatcagccataaaaccttttttccagttttgcattgttcttttaactatacaagtaggctctgtgggctgaactgatacattgacagggaaccttgatgttaactctgaaactcctcaagccgctctctgaaggggtttgtctgaagcctggaaagacaccggagctatcagactagatttttgtttcctaggctttgtgtttccccaagggtgcctgtgcactacgcacatttccccttgctcaggcttctggttcagccacaacaggatgcctcccaagaccccaggtcacgcccacagaaatgaaggcactggattggggaacccagaggcagggcagatttggtaaatcccaggatgctagtcccccctgcacatggtgtgtctgtcacttaacatgacaaccaaacaggtcactagaacttagctcatgcaacctcggacctcttcatcctgagctttgtgagagcatcaatcagggcgtctcagatctgagctttgcaggatttccgagtcttccaaggtgtgtgcagtccctggtgatctgtgacatagagtttaaaattagaaataacttgaatttggtggaacacaatcatttattgttcttcctcattgtaacctagaaccttataacattttatttttctttatgatgggtctcaccacatacacagcccaggctggccgggaactcattatgtggcccattctagtctcaaagtcaaagatcttcctgcctctgccttcagagtgctgggattgcaggaatggctcactatgcctggtttatgaacacttcgtaaaatataaaacaacaatgaaaaatacaaagtcaagtttaaaacacaattgctaaagcaaaccagtgctgtagaaagagtgaaaacatatagaagtccattcttcaaagtgcttctgttctatagcacatcactgaacctgaaaacataggcataagcagaaaggggaggccactggcgtgtctgtgggccagggctctggcagtgatactgagtctgtgatatgcctaaccatattccccgcagcctccaccatgttgatgagccatggctggcaacatggaaccatctttgttttctctgaccttttggcacatgaggctcacaatgtattatcaagaggagcatgctttaaagcaaatggtaccacagtgagaccttatattgtggtaaagggagcagacctgagcataatgctttaggaaaaactttttaacttagcttacaaaacagcgcgtttcactgtcacaataaatgtacacacacacacacacacacacacacacacactttgtccatgttaccctccactatcttcccttttactcctcttcccatccagctagtccctttcctcagcccagatagttctcatcctggtttcatatcccatatgtgtatagggctatggatggatagatggatggatggatgaatggatggatggatggacagatagacagacagttctagattgcacacaagagaaaccaagcaatgtgtagtctttctgtccctcatgatattcctattctcacctcacttctcctccctttggacctcgccctcctctcatcattatccctattttggcagggggaggggcagttgtttcaagacaggtttctctacgtaaccctgactaacctggaactctctagaccaggctggccttgaactcacagagatctgcctgcctttgcctcctgagtgctggaattaaaggcataagccaccaacacatggcttcattagtgcctttttacttcatgtcacatgtgtctgttcgcgcacagcacacacacacacacacacacacacatcccacatacaaaacaaaaaaacaagctaaccatctctctgagtcttcagcagaccctttatagtagctatcataatttctcctacttccccatcctgcccagctgaggataagggactattcagagctctatctcctcagtgtcctgatttaccccttgtctggaaggcaaacaaacagggaagttagcaagaggaagctgggagaaggaagagcgctcagttcattcatgaggacagctctgggcttggtgaacacagctctacacaaaagacctgcctggggaagtgactttcagtgaaggacacttgggagagccctgaacttcagaaattaccctcaggcaagcccagcagctagaatggttaaggtttgggtccaaggaggaagctagaaggcttctgaggttgcattcttcagagtccagagctgaacatttttatggaagtatcttacctagaaccccagagagggatcagggttgagcagagagaaggaaacatcttagtctggtctccactactgagcagtcccctgaaggtggctttgagtccatctaaaagaagcctgaggacatgctgttatttcagagtcatcctgtaggagatgagggagctgggtgggctactcatcagtagctggctgaagactgactctggtgtgggggtggggtggggtaaagatccttcttggtctctgtgtaacagacaaaacaggtcccagcagctgcatgtctcctggcaggagatatggggctgactgtgagggtggggtcgtcttctcctgtgtattctgccaaggtttgagaagtccccgtggtgaagtacaagtgttgaagaaggccgccaacagccaggtcttcacagggattttcaggtccaaggaagatctggcatactaaagtaatgggctaatgggcaccttgtccatcaatcataagggacacagtgtccttagttttctagggcttcattttggagggacaaaagtagtcatctcaggttgaaggcttgtttgttggcttaagattgtaggtctgatgatattttatttgctttgctaattttggagtggtttttgtttggttcttaagatgaagtcttgttgtgtagcccaggaaaagtcttgattttatgtcacatacgaaatttgattccagaggtatagaaggcttacaaacaaatgtgtataaataagcaaacctgtagacaagtcaaagtagaaagtatatggactctgtactacttcaagatgaacaagaaccataatgacaagtttgatgattttactctatcttttggcctagtagcatagccctggattccccataactccagaggctgaggcaggatgctcagtggttcaaggtgtgcctggaaacagactgacagagtaacctagacaatttagtaagacctcaatttgaagttctctctctccttccctttctttactcttcctcttctttctcttttcttcttcctcttccacctcctccccctcttcctcctcttcttccccctccccctcttcctcctcttccttcacttcctcctcttcctcctcttcctcccnnnnnnnnnnnnnnnnnnnnnttcttcttctccttcttctccttcttcttctccttctcttcctcctcctcctcctccttcttcctcctcctcctcctctcctcctcctcctccttcttcttcctcttctgtcccttcctcctcctccccctttttaatgaaaaatgtaccccaaaaggctggttgtgatggtatacacctttaataccaacacttgggaagccagtggcaggctgatctctgtgagtttaaggtcagcagacatattaagtttcaggctcggtggggcaatatagtgaagtcctgttttaaataaataaataaataaataaataaataaatgcaatattaggaataggctagagcttagtgataagcgtgcctgcctagttaaaccttgtctaaaatacatacatacatgcacacatacatgcatacatgcatacatacatacatgcatgcatacatacatacatataaggaaatgagactctgactaagatagatagagagactgatagatagatagacagacagacagatagatggaattaatggtaggctggagttcagtgacagaggatttggctactaaacacaagtcccttcaaccaccaggactgggaaaggaaaacagagattctatcatcattaaaagtttaagaaaatgttaatttacaatggtctgaaagaaagtatttgaaatatttgggacaatgaattcaactcataccttatataacttaatgagaaaagtaaaaaatctcccaactgagcaacagaacaggcaaaaagagacgcaaatacataacgaaaatatactcggtaccaagcaagccaaagcaaaaaagaaaaagaattgctccatcagattggatgaaatctaaaaattggatattggggatatatatagtgacacacttttaatcccagccctcaagaggaagaggcaggcagaactctgtgagtttgaggacatcatgatctagtcctaagctagcctacatatctagttccaggctaagtggggctgagttcctgtgtgtgtgtgtgtgtgtgtgtgtgtgtgtacatacatacatgtgtatacacacacacacgtaaatatatatatgatgttggaatatggaagtgcttacctcaatgcctttgatacccagaaccagaattgtttcaagttaaaagtggataacaggctgggaagacatttcagtggatacggcactaaatattcaagcacaaattactagagtttggatccccagagtttggtacagttagcacacacttgtaaccctagtgttcctacagtggggcatgaggccaagacaagaaaacgtccacaagtttgtatccaagctagcccagcagtaaatacaaaagaccctgtcttaataagttaaaggcaagaacccacgacccagattgttttgtggcatgtgcatgtaacacacacacaattaaaaatcagtagagctggaggaatcactcagtggataagagctgctcttccagaggacacaggttcaattcccagtaagcacttggcagctcccaaccatctgtaacattccagatccagtgttttcttttggcccctgagggcaccaaactcacatgtgtgttatacagacaaacatgcaggaatgacacccacccatatatatttttgaaaaatagaatatcaaactcagacaagtgccatggacactttcaaatatggcagaggcagttaaaaaaaaaaaaggcaaaggcacatggataactgtgacaccacctatagcctgaatacatagatgctggtgtttccctgagatttcatatgcttcacaaggagaaacccaggatgctcagctcaacactgctcatgatagcaaagcagtgaggttgaccccagtgtctgtcacagtcaaagtcagctgggagtagaggtgcacgtctgtaacctaacattggagacactgaggtaggaggattgtcatgggttctacaccagcctgggtcacacagcaaatattagagcagctagggctatggcatgacccttctataaatagatcaataagcaaaggaaattaagattggggtatttccccacatttaggtgattcccaccggattctgttgaatgactcttatggcagaagtaagctaggaagcatgtcggtatgattcattccattgggtgaaaaaaacacagagataacaagcaagaatgatccagttgggcattgtcaccagcttttgtaatcccagtactcaggagggtaagacaggaggattgcctcaagtttgaggccagcctgggctacatagttccaggccaggttggggtacaagtgagtccttgtctcaaacaaaacaaaaacaaagaaaatagctggtcgtagtgacacatttataattctaatactccaaggctagacgatcagaagttcaaggccaaccttgagtacatatcaagttggaggccagcataggctatgtgagaccttgtctcaaaacaacactatcaacaaactcttgtctataaatggagcccggagcccgtgctaccttttattccctggtgataattccagtaacaaagattgtttacaagtgtggatggggcccatcattttcagagttggctttggaaaacccccagtgtgggatgtacccaccagacccacgaagcagcaggtcaacagaaatagacaggggagggaattgtttggatcatgtgatttctcaggtcctggaataagccttttcccacacagttgattcccagaatgcaaaagcccaccagactccaaggccacgttgatgaattggggtatagaagaaattgtgaagctggcagccaagtgcccgacgtttcccacaccctgggtctccagccattgccctatcagctgcacatcccttctcagcattgataacattcctgagtgacaccagggatttgtagcctcgctctctaagcactttcttgttctatttttacttgaccttgaagagaattattctgcttttatctaaaccccccaaaaagaaaagatttggggttccctccctgtttcctcctccctcccgtgtatacagagttacatacaatgacttttcttcccgttagaggaaaatgggtgcctagtaggtgggagaattctggtcagataaagatgcccctgccccagatccttcctggctgctggtgatcagagtctcttccaggctgagagggcccttaaggaccctcttaagcatcccttagaattagctctctgtcatcttgattttgaaaaatgggaggcactatatataggaagaggaaagagaatacttaggaaccagtggccgtattcaatcctccagtcaccttttcatagcatcaccccttcagacttgtgactggcccaaggtgacccagcccacagaggaagagggatttgaaggctggccttcctgagccccccaagatggcccagttaccactgttccacactctccagctagaattaaagctgagagagagagagagagagagagagagagagagagagagagagagagagagagagagagagtccaaatgctgagctgtactttatagatctgttggattcaaaccttagtttctgtgtggatgaggattttgaggatgagagatatgctggggtttgggagtcagaatcattgtctcataaactttatgcctgtcaacctgaggtcccatctcaccctctgactagatcagataacagccactgttatccccttcactatggactgcaggcttcctgtgtgaccagagtagtcagaagccacactcgtggactagctttgcagatgctttggcatccagtcttctctggaccatagcctcagcatagtgggacatcagcagagacattcagacctcttgattgatgcttgtgtagggattgtatacatcgtagaaacttaagttcagtagttctcaatctggattgtgacccctttagggggtcttttacaggggtcacctaagactatgggaaaatacagatatttatattaccattcataatagtagcaaaatggtaattaaatactgtaacagtagcaaaagagttacaaaatagtaatgaaaataattttatggttgggagttgccacaacatgaggaactgtattaaagggtcacagcattaggaagactgagaaccactgctttagttaatatcaccaggtgcgggagaagactcctgcagacgctcctgctaacttttaacatgggttcctcgaggggttctgtcctcaaagaatgtccaaaagaatgaatttaggaagaaccaaatggaaggagtagctctcggtgatgacatttgctggtggaggagcctaatgtgtctacaagcaatgctaagagcaggcctggacctggaacatttgactctggtccagttcttgagggattccctctatgttttcaagtgtgggggctaagtagggattggatgaaggagagaacatgtctccctctgtcagggatccatccaggagcaacttttgcatttatctaccttctgactttcaggtcactgtgcagagaaatggtgtactcagtaattagcctgcttggtaccactaagtgagagccacactacaggatctgtgcttgtcgaggtttagagaagggaggggggacaaggccaagagctgcagtcaaggtgcagtgataagctcaatggctgcaggaagcagctcagctgccagggtctcttgcttcttctggggaaggccactggggacccaggaattgaactcagatcttcagctatctcacgggcctgcagtcccctcttttatgttcaaaccagtgttgttggtagccaagtgatgaagattgcagaggtgaatggagacatggtgactactcctgctgctggggtaggaatctaatctgtgaggtttgcttaaggctatggtaggatgtcccttgggtggggccctatgctatacagctcttgtgtctagaccatagtgcttgtgagcaccgatggtgaacacccatggaggttttagttgtagttctaagctttcatgatacacccagtgtggatgctaggatcagaaccctgatctccagatagatcagtaatactgttaactaccgaaccatttctccagtaccttgtttgtgtttgagatgatagatattattccaggctggaccctgaactcactgtgttcaaagatgatcttgaattcttggatctattgactcttgtccaggcccacaagtgtgcaccctcacaccctacagcttaattttagacttattttttctcataatttcatattcaaccatcatatccatttctggcaagttgttcctggatcttcctcttctttctcttctcactgaccccaagaagtccaagctgatcccttgtctggggccctgctattgttcttaactagtgtcccctttctccaccagcacttacaagcatgtatagcccaaagacaagatttctttttcttttttttttttttttttttttttttgatgctgtagatcaaactctggaccttgtgttggttagacaagtgccacagctactgagctatgtccccaaatccaactagacagtatctacagatcatgaaatgtaaacctcccaattgccaaaattaaaaatacccactggcttttactgcaggaaactcaaaggcatgaagagtgtaatatttttattaatattaacatcatctagtgcttgcatacttcattttccaggttctggaactttatgcatgatagactgttcctttgatcttttcatgtcattcagagctctatttcctgtgtaaacaccttttcctgataacccacactaggtagcaaggccccttagttaccccctaagtaccccttatctaccttcaatccagaaagtctcaacactcagttctggggtctatttctccaaccagtgaaaactgaaacctgccaaccttactctctccacttcatgcctggcatgaagtgggtgcccataaaggtttgaagctgaatggatgaataaatgaagtcagacttttcaaatagcttataaatcgtctcattgaatgttagcataagccacatgtatatgaaaaatagctgcactttcaaaagtctggaacagagtagcaaccatacatgctttctacacacttacagtgactagtcatattgggaagctggagagtgtatctcgggggagtctcactggcctggtatgcacagatcctgagttcagtcttcagcaatgccaaagaggagataggtggacttgtggaggattgggctgggaggaaccaaggtgaatggatgagcctgagatttacttcagcctttgggatgagatggggcctcttcaaaagaggtgagggacacaagacagccaaagtcattaccagaagaggtcacagttatcccctagatgtctccagggtcttccccaacctgaattactcactcctagccttgagcaaactccccaccaccaccaccccataacatgtctccatgcttttatggtttaatttcaagattttatattcatttgttcactcattcaatcattcatgcaggtgtgaggattcccatgttgttcagtatggtcttagtcttctgtgttcaaatgatccttctgcctttacctttcatgtagctgggagcagaatgacccactggcttcacatttatcatcttaaaaggctaagctaggcatagtagtagctcatgtctagaatcctactgttcaggaggttgagacaggagggttgccttgagttgtaggtcagctttggtgtacacagtcagtttcagaccaacctgaatgacctagcaaaaaaccctttctcaaaacaccaaatcaaaaactacagtgaaagagagaaactgaagcaggaggatctcaaattcaaggccaaattgtcatacttagtgagttcaaggctagcctaggctacatggtaaggctggctcttcaaggctagcctaggctacgtggtaaggcctggctcactcaatgactcagttaactgatcaatgaaaactggagatacagctcaggtagaatatttacatagtgtgtatgaggcctgggtttattcctagaatcttgccaaatttgaatttgtaagtactgcattgttttcttgtctatttttttttttgaaccagtgtcttgttgtgtagcttagactactttcaaatctttataccccttcctcagcctcttgttgctaggattatcgttgtgtgccaccatgccttgttacacacacacacacacacacacacacacacacacacatatatatatatatatatatattttttttttttttttcctgagacagggtctcactctgtagccctggctggtctaaaactcactatgtaaaccaagatggcctctacctcacagagatccttgaaatatttcttttgacaaaaatgagtttggagacctggtttgagtaggatttatttattcttctatattcatgttgagcaacccaagctgggtgtcagaatcttttccttattacaatactgaaaccccagctctttcccaatatcaaaacccaagtccttcctctttttaaaggggacctgctcctccccctttattttttcctctggttagaggaaattcacagagccaagatttaaaactgggggtaggagggtcatctgttgagggctccctggctttaggaacacggcccgcctcttcacttcctgacgtcatgctatttttgtctctgtatagctcattgacacgatcgcctcggagatcggagaactgaaacgggagatggtgcagacagatatcagccgggaaaatggcctggaaccttctgaaacccacaggtgatcaaagacaaagctaggtgcttgttgcagcgagctgggggacgcagagaagctggtgaatgaagagggctggcaatcctgtcactccttcaaagtttgggcactgggagtgtggtgataccaccagatgaaattctctgtaggaggtgggagtggcctagaagctccttgcctgcttgtttattttaattgctttgaaggcacttgaactttctaccttcttgattcctcctggcaccagaaccgggaaattgtcagtcacgtatcacagtgatggaaagagtaatacagcggaccttccgtgcatgaagtagaattcagtatagccctggaagtctccagaaggtttaaaggggagcaactaaagaggatggacccattttgcattctcaggtcagaaaaatcctcagatctacaatagctattaacctgaaaagccatcagggggtttataactaaatgaggtcataaatggctgtgccaatttggcatgctgcatactctttgaatatgtaggaggggctggttttgcactggaaaattatctttacaggggtcagaggtgaggttgtaggttgaaggtcaaacctcttagctctttgatagagccttagttgttggcagaaaagcagaaggtcattgctactgaatgatgggcgtgttggttggggcctagaaaaccaggttcatcaccccaccccctcttccctgcttgaggctgcatggaatagtacaaagttaagatttattatgtgagtctgcttgcaagtcacaggacacgcagacaaaccaggtgacactggttgcccaggcaagtttcaaaccagcctgacttgttctctgcccaagactgagggaggggaaaaaaaagccaccaatccagggaggcggttgctaggcagctagaaggtggtgctggagctgcatttgccttagctgggcaagttctaggtaccctctacttcctggccatttctacaaagtagtggaggtagaccaggtgtccttccatgcttcttggcttttagtgctttctttataccctggtgtgaatggactttgattagttacattgttttctcccataaacttgacacacatgctcagtgcacaatggttttcagctagagatttttccccccatctcatatccatagttcaaaggctattcttggaacttttgtgcagggttgaactttagtctctgcactgctatatgtaagcaaaactggagtctaggctgataaggagtagaatttagtgacatttgttttgtctatgtctaggagaaatggaaaccatgtccccaagctctgcaggggacagacacagagtgaaaaagatctcctctaagtataagtcacaggggttattaaggttttggggggggggtgggctgcaaaccattgagatcttacttcctgacctcagcagataatagggtgagagctggagttcatttaatcactaacattgcttgtgtttatttgtggtgcatgctgagtatatgttgcacttctgaggctcactacactgagtataccacactcccagccctaatatctcttttcatctttttctttccaaatttaagaatgatcaaaagtgtgggacgtgactggtcatggtagtgaatgcctttagtcccagcagaagtagaggcaggcaatctctgtgagtttgagcctaacctgatctacatagcaagttccaggtcagccagagatacataatagataaacctggtctcaaacaaatcagcaaacaaaaccaaaaagaatgaccaaaagtacaccacaataacatatttgttcaaactaatatccttggatactgtgttcattaacatggaatttactcatttttagaggtaccttacttgccagacatagtagcaaatatttgttttatagatagatagatagatagatagatagatagatagatagatagatagatatagcgagatagagatagagatattgtgcttattatgtgttggcctcaggagtttgaagctaccagcccattgtatctcctaactattataaaagacagagagaggtccattattaagcttgttctactcatgtggaaattgataatgtggctaaaacatcaaaccaacaattcttggtcattaagattttttagaagcagtgactgcttttaatttatccattttcccaatggaggtatcaggagagccaggcaacagggaggtaggaaaaagagactttgagttgtttccagaacgaagaaagacatagccatgggtacaagaccacaattccatcctggagttgtattactgctgtagagaaaagtggttgagcacacagaacttgtgatcctgagacttcaggggctgaggcaggaggatggaaagttcaacctagaaagagggagaagagggaagagggagagaagagaaggaagaaaggagggagagggaggaagctagttagcagttctaccctttctagggaattgctgctagttttccagtgcaccagatgtaacaaatgcacccttgtcaccttcttctgacatccttctccataagtatgagtctgacagggcctctcctgtccctcccaatagtcattgcaaaatgcctgaacttcctcaattgatggaacctggggttaaataccaagctagttttcctaggcagtaaaggacctctattcccttgcttgggttaacattttgctactccatggttaactctgaaatgttctcgcagtcttaatgttttcttgtgccgtggactccttttcagaatagcatgtttaagtgtattaaatcaaatttgatggcatgacataggaaaaacagctatgcttgaaaaccaaatgtacaaatgtacaatgtacaaatgcagtatttcacagcagactcgtttctttactactgcaagtgggaccagtgatggctgtcatctgagcagagaggaagctctgttcctagtgtgactgcagaggaggcacctctgggttctgttggcagcaaaggcatagccactgggatgctcttgcattgttgttgcccatcttccaggaggaaggaggtacatattctcatcaccaccccgtgtgtgtgtgtgtgtgtgtgtgtgtgtgtgtgtgtgtgtgtgtgtgtgtgtgtgtgcgcgcgcgcgcgcgcagacacactggagccagtagaggccaaaagtcaactctgggtctcttcctctgttgttgtccaccttattttttctgagacagttccctttatgaatttggatttcactgtttcagatagactagctggccactgaactttcatacctctccacctcctagcactaaggataaaggtacgagccaccacgtccagcttttacatgggttttgagcatccaaactcgtccttgtcgttgcacatcaaaaactttacacgctgagctatctttctggccagtatgttcatttcaaagtgaaaccaaagaaggctgggggtgtggctccgctgtattccatccctagcactgcgtatcaccttcgcacatccttgtgtacatgttaaattgtctctaagcagggtagagtggcacatgctatgaaggtggcatttgggcagtggaggcaaggggatcagaagtttggggtatggacatcacaccggagactcctctcccctctcccattgctgctctggcctccagcctgtgctcccttgttccttgacccccttaaccctgggatacccagacctcttggacctattctctttatctcttcgctcttcatgcagttggccatatctgagacatttggggatttctgttctcaatgcccacatcagtaaaataggaataataatagagcaactttatagcatcctgaggaagaatacacaagccgtaggctgtaaaagacttagcaaagtatctgacctgtcagatgcagtgtatatttaccaagaaaagtctctggagtctcaagttaatcccatctggtcttgtggctttgatgccatcaacatgttggtgatttctaacttaggtcctctctggctgatcctctttatgagttcagaggtttgcaacaaacttacagagactgcgattgaacccttggggtccccttacaaagctactctctcccaggtctttctaacccactcacatgaaccttcctgccattcctgcagccccgtgtttataacccctcttccatccgtattcagctcctagcagttccacccattagagtagattcctgaagggaccccttctcaccagcaccagcaccagcaccatgatccctatctggtattctggccacaatgctttccacttttctgggctgtcatataagcagaaatttgccatataagcaaaaacctattttgtactgtgttagatattggaactaatccagaaataagtttgtttgtttgtttgcttgtttgtttgtttgtttgtttgtgccagtcattctagcagcctaaattgacctgaaacccatgattgttctgtcttggcctctcaaatgcttagattataggtctataccaacatacctcccttatagagggatgtcagtaggttattagcaaatacaataccattttatataaaagactttagtatccacagatttgcatatgctggggggttcttgaaccagtactgagggatttgtgtgcctatttgcttatttaatcatcttctacctccaaaaatggccaaattccgtgaaagcaggagtttggcttgttatattagattttggggccaagagtcacgtctggcatatgacatattatccatagctgtaggagaataggtggccaacaggcccatagcagccctgtgaagattctaattagttagttataggcccataccaagcgtaagatgcacacacagacacacacagacacagacacacacacacacacacactactgtacacaaaaagaaaagctgtgctgagcagtatatagtgcttacagtatatgcctgtaatcctagcactggggagtctgaagggtaatgcaggtcccatgccaacctgggcttatgcagtgagttcaaggacaacttagataacttagtgagagcctgtcttgaaagaaaaaaggaaggaaggaagaaaggaagggagggagagagagagagagagagagagagaggagagagaagaagaaggaagaggaggaggaggagtgggggggggagaaaatgtgaggttgaccttagaccgtggccacaaaatgggcccccggtcccttcccttctgtctttatctgtgcttcttgtatcagtcctgaggtctgggctattggtgtccttggcttgtaggctaataactgattaattctgattccaccactggcaaaaagaagctagataaccagaaggaagatggcagggtcatttctggtggtctgctccctctatgtggcattgtgtctctccctccttccaaaggctggggagaatggaaacataacagagttttgcatcacatccctctgggtgaaaggtgcctgtgttgggggacactgtccagacctgaagtggtcccatgttccaccctcatcttttttgagctcttcattttgagccgacagcctacatattcctctgtcctcaggcaaagaaaaggaatacaaaaaaaaaaaatctcataaatattctcttggcccagactgggttttcaggactacagaggatcctagacacacacacacacacacacacacacacacacacacacacagagtcatcctagccagaggcattgagggacattgctcttgttgccagcttgttagtgcagggagacttggaaccctgggtgatatctgtggtcgtaggcctcctctcctctcaccctgccccagtcagacaggaatttaaagctttcttggccagttccggttaatactgttataatgtaacagttgccctccacctttggactgtctagaggtttgagcttcatggtagcaatgagagggcagttacatcaaaaccactactctcctgccttgaagatccagagcccaagagagaactgtatctcgagtagtagttctcagccttcctaacgctgtgaccctttaatacagttcttcatgctatggtaatcccccaaccataaaattatttttgttgctacttcataacaattttggttctgttatgaatcataatacaaatacctgtcttttccagtggtcttttgtggggttgagacccacaggttgagagcatttgatctaggggaaagggaattccatcagaacgcgtctctagtgagacagttgtatccaatacactgctctgtgtgtgcccttcttgaagaactctgtccccgcagctaccacttttaaagcaattcgttaatgttggatataattcagcaagagtacatgagtatgtagctaaggtgagttttcacagagaaaccccacagccaggaaccagattggaaaacagtttcccaatctccccaagggtttcctctggtcatacctgcttcaggtttaaccagtgtcctgactggcagtgctctaggtgtttctgattgatgaggttattgtttgtctctattttgatactgggaattgagcccagttcactatgcacctgctctactctactttgcctgatttccaactttatataactggaatcgtaacagcatatgcctctagaagtctgatttcttttgtctcaacttttttttttttttaacatttagacaactttattatcttgttttggttttgttttttgttttttcgagacagggtttctctgtgtagccctggctgtcctggaactcactctgtagaccaggcttggcctcgaactcagaaatccacctgcctctgcctcccaagtgctgggattaaaggcgtgcgccaccaccgcccggcttgtctcaacttttaaaaaaataatattccaattatgtgaacacaccaaaacttttaaaccattctgctattgactgatgatatttgacttggttccaggtcagcgttggattttgtcgttgttttgcatttttgtttgttgagtggcatatcatatagtcccagctggactccagttcgctgagtagttgaacatgaccttaggagtggaggagggcatctcactaagtgtccctgtctggcctctaagtcacaggaagattcttgcctctgcctgccaagtgctggaattaaagtcctgggtgctcagcgacctagaactcttggtctgcttgctgctgcctcttaactgatggaattacaggtgtgctgcaatatacactgtcagtttgtctgaagaactgttcagtatttcctcaactagtttgactcactccactaacagcatcataactataaatatcgttcagatatttttgtagttcttcccttaagattactatacccagtacagtttcctctatttaaaaagttacctttagtaacttcaaatatgggattcaaagccacctcagtttattctttccccgtctttcctcaaagagactctgaatactctgttgttctgaggactttaaagagtgcattcatgacatccttggaagccaggtcaagccactggatgaaaagtcactgtgtcttttgacttcttacactatctgtgtcgtgtaccatgttagtcagtaaataaatagtttcctctcatatcacatgtggaaacctgtctaaaccataggttactcactgttgctccagacttggggcacttgctagagagtcattgagaagccagtcctagaaactgagccaagtccatctttaaaagaagggttggtttgagagctggggggggggggggggaggtatgactctatggtagagcccttgactgacatttacaaagctctgggtatcattaccaacactgaaaacaggaggggaaaagcaagtggttttcttcctctattatgacttctgccctggtttctgcaaaaataggagacttgtagaaaccatgtgttgcagaatactaagcttcttttgtagtgtcttgggctctttgaagagaaggtttgatgttcacaagtttgtagtccctttctagactttgtctgtttgaagaagtaaacacatatttctcctgtgtcttgagcgttcccattctttctcaaggaaaccagaaagagaagcttttcaaattgggtcatgattgaaaggcagctgaaagtgaaccctgtggaactgggttaggtgaagctttaactctgggggaacatgctctgacctgcctagagtgagtagatagatgtttgctagattgaccatctctctccaaccatcccctgagctggcttacttcaaagccctaagagtgctttcaacatggcttccaagaattcagtgaggatttgccaaccctctgctcatactgttgccaacatgacaacgattctgtccagcctaaaggagtatttactgagtggatacagtttgttagggttccccgagtggagcctagagattcacacaacacagaaaggacacccatcttactacaaatgggtgtcatataatgggatgaacgcagaggactacaggaatgtgagggatggagggcagagggagagggagagggagaggaagttggggaattccaggtcagtgtggttttagaaaaaaaatgagatctgacatcccttcattaaagaattaattacacaggtgagactagcttgcgattacaaatgccccagagagccattcaatgtgcctcaattcttgttatctaggaaagttctttttccaaggagcatttaaattttcttctcttgattactaacagtaggaatgtatattgtgaagaaaacataccttagaaaataaagtgatgcacagtgatgcataggttcttccggtccctggggatgctgggacaggaggatggggactctgagatctgcgggtgctacgaagaaagccctatctcaaaacaaacaaaacaaacaaacaaacaaaaacagctcaggagggggggcagataacaagttcaaggttatccttggctacagagtaagttagtagtcagtctaaactacagaaggccctgtctcaaaaaacaaacaaaacccaaacaaacaaacacacatgagttcacctacagaggcaaaaccgggtactgttcttgttgtattgtataaaaagataagagagagaaggaatatgttttggtggaggtgtagtcaggtatggaggaagggggggtacctccacgggcccatgctaaggtgaccctttcccctgagggaccagccactcctatagtatagaatagagtttatttagggcatggggaggggagttaagagggtagtagagagagagagagagagagagagaaagtaagaggtggggggagggaaaaggaggggagggaaggggaggggaggagagaaaagagaaggatggcatgtggagagaggggggaggggaatggagagagaaggggaaaggaggcgaggacagggaaggagccagaaggcaagagcaatagagagcagaggaacaagcagccccatttatagcgagtcaagcacacctggctattgccaggtaactgtggggtggagcttagacaaaatgctgacattctatctctttgctgttttatctcagcagtgtgtagtcccccatttttgtcttacattactaaatatatgaaatgagtgtttgtcaactgacgagggtgtttttgttttgtttcttttaacattctggttctgctttgggtttggggtgttagtgtgggatgatgtttttcttcatttgtgttgctgtcattgcttgtgctccatcagcatctatgttgttgatctactcttagatcctcctacttcagctaccctagtgtctgcgactacagacctgtgccagggccctcactggagtccctgttttaaccagtggcaccattctgtgtcgtggttggcgtctgtgtcgacagtagactttagccacctgagtgtaacactagcaacactctagggctagattcacttcacaccttatttttctttgttcttaaggatcaagcccatggcctcatgcatcctgctacggaggcaggtgacgactactactatgctgtagccctgccctgttttatctgacagctttgcctcctggctaactccgctctgccaaagctgtgtgctagttagaattctgctggcgagtcggtcttgctaagcaatagcatcagcgtcgcacagccggaagcacttaagtcgtagaaaccacgcatgtagggattgcatgcctgtctgtgaagctgcaggctggggggtagagccagcttggctcctcctcctgcctgagctcagctccaagggcaaccaagacaacaggctctttgtttccatttcttatttttacaagaacaaatgaaagcctttgccagggctgactccatatctggccttttcatctggagccgaagaggaagctgcagagtgggattgcccccatcaccgttccacccctaccccacccccagtctttcttgtgtaaaaatggctgccctaggtgacaccatcaggttttgtcccccaattctcagtactttactcctgggcctcaggaggcaacaatttttaaaaatcaaacgaaatcctttaaagaaaaatgtgatttttttttcttcctcataaatatccccctgctgttcatcagtagaaatcactttcaggaagttgcagcttcctccggcaagaagcaatagccctcagccacatggaaatcaaatccatacccaaaatatagtagggtttcgttttccttttagagtttgaagggataagaggtcttcagggaattaaagcggtaacatgtaggaggctgggaagcttcagaggttgaaaatatggaccctaatataatgtaatataatataatgtccttgcctggcgtgctcaaggctctggctttgacctcagcaccacaatgtgaacagaaaggcagccacaactcagaaaagtgggcctgtgtggattctgggggggttggtttttttatccttttcaccttgaataaggagttaagttggatggctcaactatctctcccaactcagctaaatatgcagggattttacaaaattgtgactctccagtcctaggccattcccctcccctctgtgtcttggctagtaggtagaaggtccctcaggccatctgccaacctttgtgctataagccagacttgcacactagagtcttgtgtcatcaggaatacatctgggcctcctttcgcctccaggcttaatgttaccaagagggtttaatttagccttgagagtcaggaattgctgccgtgcctggaggtgttaagcaatcaccatatagcaactaaccagtaggtgtttttgaaattgaaggtttctgggaagttttgtgttcttggcatatgtgtgaggaattgttatttatgccagaaatatttttatcagatgcacttttttcctgtatgggctctttatatttcttcataaggaacctatatttttcccaaaagagttgaccctcagcccaaccatctgtcacacaccaccaccacccacctcccaagccaaagcccgggattcatctcccactaaatgtggtctctgattggccactgccggccattttgctataggatcaaggatcttctaatacatgaacaaaatcatggtagacacaagactctatcctctgtccagtccttagttcttaagatggcctgagcactaacctctcaaagcaagaatcctggaccatcccttgaggcactcacatgtaccagggatgggttgttagatttcagatcaaagagaactcaggagaagaatgctaaagcccttttggtctgtgttcaatgctccccctagtattgtttctccaagcctctgtcggggtgcctgctttaactgaagggttattctcatcaatgctatctattttctggtttctcttgtaagccttaagctccttctcccagtactgcaataagcactctgtatttggcaactttagacagagtgtttgtcaatggtgtcctactttgtccttgcaaatcgagactaaatgtcgtgattggctttataccctaggactagaaagactgtaagaggaatccatgagcaatgaggaaggagctgctaaaacctcagaagtatcactctgcaaagaatgaggctgcttcctgcccaaggccccaagatggccaaaggcatgactaccttgaccatccatttccagataaacacacaaacaagaaccctttgtctcctgaggctagaactaagcagccagagacttcttatctgagcacctggatgagggaagagctgtgtctaaggttgaacataaggatcccaaagtgaagctcaaaccaaacacgcaagaacgtctcctcttgctcaggagcaaggactatccacctactacctcccactcaagcctctgtcatgcctgctctgggctgaccctgaacatggttcatgtgagatcaaaatgtgaaggggtaatgctttggagatgtacagacagcagtgaggagattacagtagctgaaagagatgcggggggggggggagagtggggaaggctaggagttgagctcagttttaacaggttggagggagccagataggaaaatggacagtcaggaatagcttagccctgtgggagtgtatatagttagcatgtgtaagacccagggtttcatccccaccaccagacaaattagtaaagatggagcagtttaaactcagcaaggtggggcgagcctatcaaatagtagctcttacaagctggtcttctctatgaatccgagagaaaagtgtgtaaatattaatacaggaagaagattctccttttctagcctaagatgtcatagcccatttcaatcatctttcctattccctttcttcctatctttagtattaactcatggatcccttaagctgattttccttttatatatttttactttcctataaaaaggtcaatctcttatctctaccatggttgggaaatacaattgtaaaaggtacaatactacttactacactgtagtttaaagacctgacttggctttagtttttaattctacagttggaccttgcattccataaaacagaaaaagtgatgggcagaacagatttgtaaaaactgatatagggggactaataaagcagggcggggtgaatgaaatcggatcaatcctttgtaaggtgggtggggctggaatcagaaggacagacctcaggcatcagattccttcaagtacttgctgtgcacagatgaaggtggagggaactccctcctctccagtggaaagctggccttttctgacttgctattttgcactagttgggatttctcagaaggtcaaataagtagcttcatttcactttggtgacattgacattagctaaatactttacctgttattgtgtgtctatgtgtgtgtttcatgcatgtatgcatgaatgggaaaaaaaaagaaataaaaaaggaagggcacgacgtctcctaaggcatggtgaaggagaaggtttattatagataaaggggagagcatactcagggagagacgtctgcgagagcccagagtaaacacagctagactcagctgggccatgtgaggagagatggagatggagggcaagagaggagctgccgacctgtgtgtgtagtgcccatgagagccaatagaggctgtctggtcccctggaaccctgtgagtgctgggaatcacagccaggtcctcagcaggaacagtgtgctttgctgctgagccatcttcccagtccctggctatatgacctttagcctgagtgatatttatctcagtctcttacaacattgcataggagttcaggccaaaacagtggcctcctgtgcttcccatgcaatgccattgaagttagttctactcagtaaagcccatgcttctacaagctgtcttaattgctctgccaccttttagggaaactgttagtttttatttttatttgtttgtatggttgttgttgaaacagagtctcattaagtagccatggctggcccagaactcactatacgaatcaagctggtcttgcactcacatctacctctacctccaggtattaaaggtatgtgccactaaacccagtttattgtcactttttagccaaccactggaatgttggttaaaatatctaaatgggctatgactcaccttgcaatcccagcactgttgaatggctggacaggattgttgcatgtttgaggcatcttgggctatgttttaagttttgggcaaacctgagctacatagccagactctattttgttcccagtggagttgttttgagtttgcatttcctagcagaactgtagctttttgtgctcagtgatggatgaagcataaaccataattcagttaccagccaaggcaaactggaagttggatttgacttagtgtttgtttcagttttccttgcattgacaagattagcatccatttggttatacttgtactcttatatttggaaaattatggactgaatttatgactgccttctataactgctccaggaaaacaaaaggaaatttgtttccattaacatttagaaccaaacattactgtgcaggtccatggtagagctctttcctgccatgcaaaaggtcctgggttctatccccaacactgaaacacaagtaagtaaaaatgaagtatagaaaacccactaggaaccctagggaatggccttcaaggtttaagaacagcaaggggagaacattcaaggggcacttggctggagatccaggggaagcctcacaaagcaagtgttactaagattccaccaccaagttcttcaaaccccagacctcaggcagcccatatccaacatagtcactggcctggaagacacgggcattggcatctcttccaaaaagtgagggttccacacccttgtacggtccaagggaaaaaaggagggtctctaggccaggcattaggaattggaaagcaggaaataaaagccagacggtcattcagtaagttgcaataattatgggcaccctaaggtgtgtgagcacacacacacatacacctgtcccactcagaccttcccaatgtctccaagtgactagatttccatgcctcatcagtaggctcctaagtagaagcaaaatagagaccttgatcaagcataaagatgtctttgcaagtgaaggtggaccttgaacaaagcagatttcaaggcacatgtgtgagcattggggctgagtagacacaggctctcacacgtgagcatgcatcaagcaaggggccaggtgggcttagtgaattccattgaggagctgtcaatcaaatgttttacgtttattttgtccacacgtatgtgtgttgggggcggggcatgggagtgcttgtgctgtgatgcatacatgtagaggacgctgttaggagtctcacctcctgtcttgctgagtgaggggctctcttgtttttggtgtggtactgaaaactccagggtagatagtcgttggccttttgagagcttcctgtcttggcctcccatttcactctagggatgctggggttactcatgtgcacctttacccgggttccagagaatggaacttaggttttaaggcttctgtggacactgcttttactagctgagtcagctctctggcctgcagtgtttaatttaaagacaaacacacaacaaagctttcatccttaaaagaaaaatgagacacataggcacaaagtcctagttgctcaagtcaatatagatgtttcttacacacaaagagaaggtctagggatcctttttgttttatttgttttttttaagcttactgtgttttgttctgacaaagggaagacaaaattaaaatttagtttaaagatcttaactgggatggagcaacgtatcgttctatgaaacaggatgagagtagctgtgagccgaagagacgggaggttgttttatagccacaaaggtttccaagtaactttcccagtaaggtgagaagaggaagagagtaatcaaggaatacaggaaggtctcaggaggctgcctaacccagacaacccaggaggtaggggcttgaggaatggaggtaggaggattacaagtttgaaccagcctggatacctagtgaaacctggtcttaaagggagaaaggcacacacctttgatcccagcactggggaggcagaggcgggtctctgagaatttgagaccaatctggtctgcatagcaaatcataggacagtcaggaatacatagaaaaacactatctcagaaaaaaaataaatgaggatgaaggaggagagagaaaatgacaactggttaacatgggctactttaggtaacctttttacttgattaaggcagaagggatgtggttaagtcaacggaaactttcttatttgggaaaccggctgttacctctctgtttattctttctggggcttgtttgtttctagtattctctgaaagaaagataacaacttggttgactttgagtagcagtgactccattttgatttcaggcaacttgtttaggcctggggcaggaatttagtctataacaatggagtcctataatttttatttgacagtccctatactccaaggctgaagactggaccatccagagcactgtacatcttctgagacccaatagccaggtggatatggattgttcttgattgacagtaagaatctggcttttgccttttttgttgttgttgttgttgttattaacacctaaactaggattcttatatttggaaaattatggactgaatttattgtgctaatatttttctgactgaaacaacctcacttcaattttgattcactaaatttgttaataaattaatatatctattttgttctttttttttctttttgattttttgagtcagggtttctctgtgtagtcctggctgtcctgtaactcactctgtagaccaggctggcctcgaactcagaaatccgcctgcctctgcccaccgagtgctgggattaaaggtgtgtgccaccaccgcccggcaatatatctattttggacagagccaggaatcaaagccaagaccatgcccatcctaggctacacaccctaacctcacattggtatatgtttttattttaccgtctcacatttcattggtgaaaaaaacaaaactaaactataaagtcaacataaacacttcagatgtgtttggatgaagcatgggagaaggaacagtgtgctggggtgttcaagaaggcatctggatattccgtggtctctagaactggtgctgcactgcggacatccaggttctgatcagaaagtgaaagagtctccccttgagtctgctacgcagcctcagtttcttggagatgagcctaatcctgctgattctaatgaaactatgtccagcgtcatcctggctgttttgctgagagctctccttctcactgacccctctacctcctccaactattaatgtccagttcccagaaatgaagaaagtgaaaaggcccgtcatcctccgaagagcgttaagtcaggtgtgacctaggggcaacaggtgcttgagagctctgttggaatactcagctgtctaactcagagccacgatgctgggctgttgtttccatggcaacagatgtaggctatgagttttccagtgggtatttattctcctcccattgtcccctgccctctcctgcttcccactctcttgctaacccccctcccctcaagtagtcccttttgctttcatgtcatatgtgtgcattgttaaatgtagatgcttcacatgagagaaaatatacaatatcttgtcttctgttactcttttccgtccctcctccatttaaaaccccctgtgtcctgctggactcctcctcttttcctaatggtctttcttccactggacttagcatacattcacaatcctttcttgctctcgggcaggtgagccttaaggcagagtcaccacctggtgttgaaggtaccatttacaaataaaacagtaacgctcagaaaaggagctggcccaggtctcacatgtctggaccagctaagagagagacttcaggcttccaccctggaggctggcccttgggccaatacactgtgaccatgtcattaagtgcctggattttatcatgtgatgccttactaacgttctgagccatgcaacctctgtcagcattcatttacatagagacacctgtctgtctgtcttagaagtcactggtttctattactctcagataggtctgtattgggtggaattctgcagaagcagagggattcttgtgcagatggtttcgagagagaagagcttgggagcaaggggatagacagaaagggaaacaaggcccacaaaaaccaaaaaccaaacaaacaaacaagccaaaacctctaaatctcactccagagacgccccatcttgagacaagaaggtcatgcctgctgggcagtggtggcgcatgcctttaatcccagcacttgggaggcagaggcaggcagatttctgaattcgaggccagcctggtctacagagtgagttacaggacagccagggctacacagagaaaccctgtctcagaaaaaaaaaaaaaaagtcactcccttctccagccacacctgtatgtctggagcaatgattgcttcccagggagatggcacagcaatctcaacctgtaggtcaccacccccttgggggttacatatcagatatcctgcatatcagatattacattataattcataacagtagcaaagcatttatgaagtaggaatgaaataattttatgcttggggatcaccacatgaggaactatattaaaaggtcctagctttaggaaggttgagaaccactgggttagatacagcttcgcaggcatttccaggagaatgaggaggctctccgctgttggtagcaagtgtccctaacaaccagggtgtgggctcctgtcctggagagagaactcaggaggggttgggagcatgcacctgacactccgtatttcacccatcagctcttttctgaagattatccctgataaaagccactttgtcctgtaataatacgctataaacctcacgtggccggttagatcaagtcaataccaaagactaattgccaggtctaatttatggtttcttctttatgaggctccatgaatcttactcaccctcttcctgtctgggccctgactgcttaggctgaggtcaatcatcagagcaaagagcattaaaaaaacaaaacagaaaaacctcaagctggggaggaaggttcgtgggatgtgactgtctggggagaaacaaaacaccttcttgcctgacacatgggagaggaacgtcattgtgttagacactgtcagatttggacttgttaaaatatggtaaattagtgttgactggaaatgttgggctatggtttttgagttggtttggtttggtttggtttggtttggtttggtttggtttggtttggtttgaagtgctgaggaacctactgagggctttgaacatactaggcaagtactgtattcccatatctccctgactctgaaataatgattttgaacttcaagcatctctttagtggcatgttaccatcccctcctccagccccctaacaaaaacaaacagctaactgatcagaacccaaagtgcacgtttcctacttagctctgcagccaagtgacacatacatcggagtcctcagatgtacaagatgcatgttccccagagtctgggagaactgcagcggctctggtccaccaggacctacagaatcagaattgtgggggtcaaaaccaggagtctgtggctgcaccagtccccagaggatccccacactcaaaaatttggcaaggtgtaaagcctttaaatgtgggtccagttggattcccctgcattctcatacccacatcctgcctcaaagtgtcattgacttgacctggggagcagtgtcactattgactcttaagtttctctgatgatccctgtaaatggccagggtagagaggcagtggtcgtcaggtaactcacctgtgcaaaagggattttagcatcagctttccttggaagagtttgttcttttacctcttatgaatcgtcactttagaacacccagagggacttcagtggcttttgcataaaggacagctgtaatctcactggcttgatctcctgggttcaactgatctctctacctcagcctcgtgcatagatggtgctttagctatgcatctagaagaaaaatgaaatatggggctgtttagattggtataaaaccaagacactggggccaggggtgggacctggtcttcccagggctctggttctgtctccatgatgtcagcacggcttggctgtttctgaggcctgacatcacccacatagacaatctcatgtctcctttctgcaaccctccactcttccatcctccccaatcttgaggctttatctagtgcacaccctgggtgtgtgtttgatgactgaatatatcccacactgagcatgcgttcctgctgcctgttccaggactgtgctagggacttgttcattccaagtcaggaaaggtatcagtgttaggagaaggagagagtccccagagctaagccaccttggactagaatttcaggactcttctccctagcacgtacatgctcttgatcaagatctggcctctgatcctttttttgtgctgtgttctgttgtgtttttgaaacagtatctcacctgtagccttggctggcctggaactcactatgtaaatcaatctggcctccaactcaaagccagccaaacttctggggttaaaggcctgtgctccacacttggctgccttggatttcttggtccttcttcctccatttctaagtgctagacttacaccggtcatacgtgtgtgtgcctagaccatcaccctctttaaaaccagcatcatagtgtggtgcttcaagaagtaaatgattgattgcacgctggcagagtccagcagctccatacatcctcaggcttcagtttgctcactcctcacctacagttaagtgttggcagtgaaggaggcttatttgtcgatatgattcacagaccacaaaacctctccatttgtaggacatgagtcattccggagtttttagtggattcatggcattgtgtagtccttgttgttaccacgtaccacattccctacaactcccaaagacacctggtacctgtttgtagttgattctcatctctctctcctttaatcttagccaaccactaaccaactttctctccctaagacttttcccattctgaacttgtacaattgagtcagataatactgtgaccttagctcagtgccccgttgccccaccaccacagcaggtgacagactcacacacctggctcttctcacttagcatgctgttctccaggggcattgtgtggtagccttccactttgtagctgagtaatctagcttagcctcttatcagtagtcacattttgggttgcatctctgttttttttttaatgttttttttaattgtttatttgtggggttcgggttgtttgtttgttgctgttgaggcaagttctcactatgttcccccatctgaccttgaattcacagagatctgccttagctccactgcctgactgctgagattaaaggcatgtgccacttcaccacacccaactataaaaagcttttagggcacatatttgttggcttttatgaataatgtcatataattttacgaacatcgcatacagcaccactgaattatgatattttattatccataatgttggggataaagaatatttaggtttgtaagaagaaatgaaaaccagtaatttagatacagaacaaatatccttaagtgtgttttgactgtaatacagctcaacagaacttgtgtttgtgacaagtgcttttaagcattgagacttcaggcatcagaaagcctgaaatttagcagtttgaagttctgtcctccaagtagcaaatactttagcccaaagacaaacaagcctaagccaaacagtttatggtacttaggaccttttgaaaatacgggagagtaaaataagaaatgaatctgtcctccatactttttgactggagggcggtgaccccattgtatacatatgctgtgacagatctgtccagtaagtttcagggaacagcatcagtcattgagccctgttcttttctttattctagcatggtgagacacaaggatggtggctactctgaagacaaggatgggaagacatgtccccgagactctggctatgacagcctctccaacaggctcagcattctggaccggctcctgcatacccatcccatatggctgcagctgagtctgagtgaggaggaggcagcagaggtcctgcaggcccagcctccaggggtaagagccaaaactcgggagctgaggcaggtatgctgctgcctgacaaagaaacacttggaaaaattgccagaaagttctttccagctcctgggtcatatggcttccagtatagacatcaaatacaatgcaggaaaactctggtccataaggcagtttctaggagtagattcctttccaggcctgtcttcatcttctcaattatgggactgtatggctcagcagggtgccagggcatcaaaggaaggaagcggagcccctggccagaggtccaggcctgaccttctgagcctgcttctggatccctggttgtcccctatgctcttctttcactctgagttaagaaaccctgtgaggttcagtcattcatctgggaatacaaccttagaaaggtctgtgaccagaggcttgtcttcttgggctgcccgtcttttccttgacttttcagtagctttccatgtcaatcaaaatctgattgtgtttcagcagctactacctatccagggccattgcttccccttagtcaggctactcactgtagctagacatggcagcttatatctgtaatcctggtacttgggagactgaggcagaaggatctaggttcaagaccagcctgggcaatgtagaaaaactatgtgtgtgtgtgtgtgtgtgtgtgtgtgtgtgtgtgtgggtgtatgtatgtgtatgtgtgtagtatattttatatatatgtatatatatacatatatacatatatactatatgtgtgtatgtatgtatgtatatatatgtgtatatatatatatacacaaatacatatatatacatatacacatacatacatatatggcactagggaatagctcagtagataaggcactggtcatataaagtataagaactagagtatggatccaccagccaatctgtgagctctggattcaattgaacaatctcagtaaatatagcatagagtaattgacaaagatacctgatatcaactttgggtctaaataaataaataaataaataccacttcacggctccatttcttaaaaataaacagcaacagcaaaacattattcattgtgactggcatatcctgtgttgttcactgtgataaggtctcacctatattgtagctatttaagttctaacacactacagtgaatgaaaatagcagctcagttatggactttccctaaccacattttcagtactcagggctcacaggaagctgccataggggaaggttcaggatagaggctctctgtcactgtagaacatcactctgtgcgatgtccactgccaaacagaagacaaatacaataaatcacagacaaaataaggcttaaagcatttgatagatacaaatagatacaaagtaactaagccatacatggatagtatggggaaaaattctattaacagctagctgaggaatgtcatagcagcagggtaccaaactcagctttagagtcctgcagctgctagggcctacctctgtcactctctgtccttacaagtgagtctgcctgtctttgcttctttcttccttcctaaatacagaaacagacaggactaagaatttcatgacgtcaagaccactggggctgtcagtgcagaggtgggcctgccatgtgctgctgtgtaggtggagtcctcccagctccaggaagggctatgaggggcactatttgatcatccttggaaagaattccctaagcagcatactgggctgttgcccccaggaattggtctctatggtcagaaacttcttcctgggagcctctgctttctaccagttgatttatgtgcttgtgcatctctgccaaaagttctgaagcaggaccttaccaggtagtagttccccaccctgccctgctcccctcctgggtggggcatagccattcctgctgaggcttgtatgaggagcaagctagcagaatagtctctctatccacgtacctgagctcttgacagagccttcctgacaagatggggcgggctgaggacaggcgccatgtggaccagaagtgatggtggggactgaaggaaaagcaggtggctagaggcctggtcctggtggcatgaatgtatgaatgtactgaggatgtttccgtacccttaattaagcaagaggtctgtggacagctctgtaaggagcctgagtgtgaagatagttggtttgtctggccatgcagtgtctgtcatacctacgcagcacaggcttttgccaggcagaagcagctacagatattatgtgaagggagtaagcagctctgcttcaatacagagttactcacagaaacaggaccagggtggatgcattctgcaagcctgactttgtcagcccctgtgacgtcaagcctggagagtgtactcctgttcccctggtccctagctggtctccagggaagtccccatgttttgtttcatacagggtttctctgtgtggccttggctgtcctgtagaagggagctgtgcttcatctctgccaacagccgcctctcagagcttggatcccttaccccaaacacattcacccaggatgtcatttgcagggcttctgcctcagttttaatttgtcccagagcccgagtgatcagatatgtgaaccaggagagttccatggatggtctattgttactgaggggtgggggggactcaaaagattttctggtcacaccttcccccaataagcatcatgggtagtgtaaacataaaaagaaaggcaaagatctccagggtgggggtgggtgagggggtcagctgtgaaatactgtagcaagagagagaaggtgagcgtgtaaggttcgaatgcagaggaaagagataattagtgtgggatctttaaggaaaagggaccatttgctatagacagggaccaggacttagccaaggccaccacactctgcacttcacttgatgtgcaggcaggtggatgatgcttcctggagctaagaggacacaacctacacagcagagcatggctggcctgcttctgcactggcaggcccagtggccttgacgtcgtcactggaaattgttttggtctaaaacaatttggtgaagacagtgttgggaccagagagagcagcctcagtgttggctggggtgaccgtcagagacctgatacctacctcccaaatgaagcagccattgttttccttctcaaggtttttgccattgtctgacttgacgtactatctcatttttcaaaagaagctagaaaattcatattcaaaagcaaaacctaaaactataaaataactgcttttttcactcttagaaaattcgagttcctctctcaaatttgccatgagctcacacatttgccagtgaactcacagtttaacatctacagtttgaccatgtgatctttgtttagaatttgtttcacccaccaagacagctatttgagacagtgcaagagtcaccagaatgccagtgcaaacaagggatgggtaaggttgggatgggtcagagtgaaaacagggttcctctaagccccttttgaatacgttattttcgtttcatgttcattgatgttttgcctgcatctatgtttgtgtgaaggtgtccactcctctgaaactggagttacaggcagttgtgagctgccacgagggcactgggaattgaaccctggtcttctggaagggtagccagtgttcttgaccactgagccacctctccggcccctaagccccttttgaaagtgaagtgtgttcagtaagctcggaactttctctgtagagtgtcctgcaccaagctgtttatgggaaatgttttattcacggggcctcatatataggaaaaagcatgcacccgggtttcaatcttcttaacatgtgttttgttttccttctcctagatctttttggttcggaaatcctccaaaatgcagaagaaagtcctctcccttcgcctgccctctgaatttggagcacctctcaaagagtttactataaaggagagcacctacagtaagtgccagatagtgagggcagagctgacaggagggagcctcgactttgatgcagacagatgtgtctagtcctggcctttagctttgcctttcccatccccacagtgaggtgatgttaacctcagagcaagtcataggccagttaaacaacccatgcagattgtgtgcaccctaaggcttggcacatgataggggctgagtgtagactttcttgccctgtcccctgttgggtacagtgtagattgggtgcccaggtttactgatgactaaaccataaagcacctgcagctacagagccctctttacaaggtctaaagccaaaacatgtatctacacgtcttcatgactaaatgagcctcgagcacacaagttccctccaggtagccactgttcagtcttctatgaaaggcagttcatcaagatgaatccagccccatgggcagatgacgagctggagatctgccgagacttgttgctttgcactgttaggttttctttctgttgtctactttctggtcattgaaaatgtggagtttcgagaggccaagttttaaataaaagagggaacacacagttctgaggtactgccagtctccaagaaagggtcaggaaatgaatctgcacaacagagtggggagatctgaaaattctaggttagcgagctgaggggtgaaggccaggagaattggggagccccaaggatggagcgtggcttggtctctgcatttgaaggtgctgaggctaattgaccggcaggcatgagattcccgtaccctcgtgtccagtctccttaagccaatagcctgacataggatctatggacgtgacatttgtggcacaggaaacccctgcctgcatacatgatctgcttctggttcaaccaggaactcacacaatcaagggtgactgggaaacaggacccctggggcaggctgaacctggggaacgattaaatacagattgaatgtcagagataatctgacagcacggtttagacccacagccattttaaagacagtgggtgtacagtgagttaataaataatgaatttatgttaaattgacccccgttattctgagttggcttttgaaaggttgctggcccaaccagcaacaagttctcctggcttttaaatcccttgcaattcccaaagttccccacgacaaagaaaccacttccttccctctgaagcacactgttgtcaggaaacctcgggccccacccccacccctgtttattgagtttcctgaagccagaagttttgctttttatttttttcctccatcagattctaagacttcagtcatccgctctaatcctccccaagggagttacaagtgactgaaagggctagttcgtgcaaagccttatcctatccaccatggcttactgcaggcccaagtcccaagataatgatatctaccctgctagcctatatcctatacaaattgggatgggagaagggcttactacaataacagatattttagcattatttctggacacttccagaaatatattcatgtatatttctttcacgtaagatatttcattaaatacacattctattctactgtcatccttctgactggcagggaactgttcctgtttatttcacaagtgagatggaggtggttggccaaggtgtgaggattagaaaccaagccacccctgcctccaccgtctgggagccatacatgaggcaacagcaccttgtcggaaagcatattttatttgggagcttgtgtgatggggccaggcaaggggcccggacttgcaaatctttatatagaatgtttctcagaactgatttctagaaatcttaaaccgacctcctggttcacgtccctctgccttgtgcctacatgagagggctcctgacttaccagagggagtatggcactgaaggtccatgatctaagaagaaaggttggggtgggtggacctttaacccactactgctgagtgttgatggcttcacaatacagccagatgagcccttgcccctgcccaactctgtgctctgaacttcaaaacaaaggttgttgtgcaagggaatgtttaccatgcacggagcgtgtgctgagagtgagtcagggagaccgccctcggcctcctggctgtttaaaactgggtctggctgtcagacaaccccctcacagctggtttggataagctgcacagtagtctaagagggtggagacaggcctacatatgttgtgttagatgcccttccttcccagacacactcaggaagatccagccaccttctggaatctctctctctttttttctagccttttccctggaaggctcaggaatcagctttgcagatttattccggcttattgccttctactgcatcagcaggtaaggattctaagcatctcctgacttgaaggacccgctcgatgtatgataccgtctagacatttgtctggagaaggctggtcacctacgaggtgtcagggaaggatttgacacttaaggtgttcaccccattccggtattaagcttaagatggaaacagctgcctggccctccagatgcaaattctcattaacatgtttttttcttcaagctggccccatgacttctgatggctagacccatttaccaggagacatgcccacacaatacataaacacatacccacatactgatgtacctacctgtataaacacgcatccataagaacacagcaggggcaaggtgtgtgtgtgtgtgtgtgtgtgtgtgtgtgtgtgagagagagagagagagagagagagagagagagagagagagagagagagaatgagtacacaaacctgtaacttgtcaaggtctccaatagtgtttttgaaaactccaggggacagagcccattctcaagtatggattctttaaaccaacccataaatcctgcatgtcttcttcaggccacctgggcgctcacaccctttccagggctgaaaggatgtgagtggtaggtttccattattattcttttcttgacacacataacagcttttcaaagtcagtgttcttgtgccagaggttgtagctgactggtaaagcgtttgcttacaaagcctgagacaccgggtttgatccttagcaatgccaaagaacaaaacataaaaacagccaagtgaagccagtgttctcgcagtgattaatcaaagaaactcttgctgcctgcagaaggtggccttgcctgctttcttcccttcctccctccctccctccctcccttccttcctttcttctttctttcctttcaagtttttattttattttatgcatgtgagtatttgcctgaatgcatgtctgtgcactacactcacacctggtacccacagaggtcagaagagggcgtcagatcccctggaactcgagttatggatggtcgtgagccaccatacgggtactaggaatagagcccaggtcctctgtgaaagcagtaagtgtgctcttaatggtcgagccagttcttcagactggtccttgcctgttttaacccaggcagagcccggcctggcttctgtagcttttctgtttgctcacttgcagtaatgacagggaactatcttttcagagctcacgactcacggctgtctcactgagcctggagagtcattttggtttggcccagtttattttaacttaaggattagattgtttggcatccatcatcctgttgattttctctgcccagcataacaactaagctctcaggctagctgaagctgcccagtgaatagcctgaggaagaggaggcatctcctgaggagaccctagccctgctcactagcaggaaggaaacgagggcagctcccaggatggacagtgcctgcgtggggagctctcccaaagggacgctccagggtagggtcacagttcctgggacctgtgtgcttcactcctaaacatctgagggacaactgctcataacacgtctttttcaattaagagaatgaagacattgcctagctgaacactacaccacttctctttcttcggcattttaaaactcagctaaatatattcgtacttaatgcacacttttgttttgttttggtttggtttggtttttttttgagacaggggttctctgtgtagccctggctgtcctggaactcactttgtagaccaggctggcctcgaactcagaaatctgcccgcctctgcctcccaagtgctgggattaaacatatatgcagggcgatgtgtgttgcagttgcagtgctgggtatcacacaaaccacaaactggagctgctttatgcaaatacgaagctttggggtcaaagtttagaacaagagtatggtattattaatgtatttatatcctgaccattcaggattatattaaaattgtgcgaaaagcaaacaaaacctttaaacagttgtgaggtatattatctcaagcactgaaattctccagcttccttaagcgctgcataactaaaaccaatagcaacccgatgctatgatgattgcaatttctgtctctaaaaggtttaaaggaaacatgttacccaaagacatagccccagcagcacccaccccttccctcagccacccccaccccaggagaccacaccccatctggtctcaagccacccaggttaaagaggttgtcggtgctggcatgtcagccagaggtgaggctggctgtcaactctccttccaactttgccttccagtaattgtgctgctgttggggaaagagccttacacccacaaatatttggcagccacagagagtagatcccgtctctgtcctctatacttagaagcaggccacagtacctgctagagtagccaggcaggctggtgattaaaattcgtaaagtaaaggaaggccattggcaaattactaagcacactacacacttgaggtgcttacagaagaatccagcgccaacatttgtaggtaaaggggcctgagagtcatttctccttagcttccattacttctctaatgttccttactgacatgcttggtcatcagtggttgacaggatccagtcttaaagtattttcttaagatttatttgttttatgtatatgagtatacccgcagctgtacagatggttgtaagcaatcctatggttgctggaaattgaattcaggacctctgctcactctggccggccccgctcgttccagccctgctcgctccggcccaaagatttatttattattatatctaagtacgctgtagctatcttcagacacaccagaagagggcatcagatcctattacagatggttgtgagccaccatgtggttgcatgtaaactcaggatcttgagaagagcagtcagtgctcctaactgctgagccatctctccagcccaacaggatccagtctttccaaagtatttctgaagtttcctacctagttgccagtagggaattcatcatggtgggttcccacacagaacgtgtctggtgtgcacggacaaaagaatccacagtgagtgggcacccaacttgcagtgttggatgagctcaatggaaaggacagttgagaaaagaagtagtgactgccacccatcagcagctgggacattgccagcacagtacagagaaacaactgcctctcacactcaattgtaccccagcatcaattgtaactctgttaagagggtctcaaaaggtctgggctgtgccacattctgcatgtccagtaagcccccaggtgatactgatattgctactgggcttggaccgtacttctgtttttgttgttgttgtggtggtggttgttgttgtttttcgagacagggtttctctgtgtagccttggctgtcctggaactgactctgtagaccaggctggcctccaactcagaaatccgcctgcctctgcctcccaagtgctgagattaaaggtgtgcgccaccacctcccggttaggaccgtacttctaatattgaaataatagcttatgtcttgcatatttgtgccaggcacaacaggcacattatcccttgccctcctggcagccttgtgaattagaactataagagtgaggtgctttcttaccatcatataatcagaacccagcagctctgagctgctgtagaaattgctggggtggggcagtggtaagagcgctggctggtgtgctagaggactggtatttgattcttggatcacagctgtcactccagtcccagggaatccgacatacctttctggtctctaagggcactgggcatacatttggcaagatatacatgcaggcaaaaactcataagggaaagaagcaaatctaaagaagaaacaaaactagcagatatagaatgctgctgaataatattagtttctctttctttagaaacaaaacatacagagcaaagataaaataaatctagattgtgcgtgtactggaactcttgggagaaagttctgtatgtaagatgttggttctgttttgttatgtgcaaactttaacatcggggctcctttgttttttaaatgaggtggagataagaaagaagtgtgtgtgtggaggggtgtcatgcgtgtgtgtcatgggtgagtgttaagatgctgggtactccagtgtaagatggctcatgtacaacatctaattgtctaaataagtcaaaacctacaaccgtctattaacaaaagccaggtatagcttcctgtcctatgtcattaagaaaacccaagccgtcagatgatgtttagactccaggcagcatgctgagctagggaaaagcttaaaataaacataggctggttttgttacacgttacttttctctgcattgcataaagaaagtagatttgaatggactgagtgaggtttttacaaacacgtgtttgcgatatactttcatgttacaagattctagttctcattgatctccacttcaggttagagccagggtcactgccccaacaggacactgaagaaactgttcacaatctcaggtcaggtgtaaaggcctcatggaagcaggagtcaatcagggctggagaagcagcctcctgacatcggagtagagcatggtagagtttgggtgacacaatcgggtgttagaacacccttgctttgttattttcatggactctgcagctttgtaattgactgtcaacagctttaagcgttccaagatttttccagccgcccagatttgatctagttcattccacggtgttgcctaatctcaccataaacaacaggatgatctggtgtgtgattctcttcaacagaaacttgcaaggcatggttttgatgacaaaataagaggcgggagcttccgtttctatcgctcactaactccgtgcctgccacagtgacccacttgctgctgttctccatgtagcaggccctccccatcccaggccctgttcaccaactgttcccactccctggaattgtcttccctgtgtgatttactcactggatacatcttctcctgcttgtgtgtgtggcgtgtatgcattgtgcatgtgtgtgggtgcatgtgggcagggcacacatgcatatatgtgctattgcaggaatcaccctcagtggaacatccaccttactcactgaggcagggtctctcagccaaagccagagctcagcactatggctattctcactaggcagcttgctctggaagttccttacctctgctttatgaggctgtgttacaggggtcatctacccgcctgacacttacataggtttaaaggttctaaattccggtcctcaaacttgtgaggcaagtgctttaactactggtcatttcttgagaccccctttctcccccagactgtgtgggtatgtgtgtatatatgtatatatatatgtatattacataaaatctgaattaactatttagaaatcttggcctaggttccaattgctttcaaatactcttttttctttattggcttaatttcttttttaaagggtgagtggggagagggggggttgctggtgccatggcgtgcatgtggatgccggatgccagagcacaactcttggactcaggtctctccattcatctttccatgggttttttggatcaagctcgggtgtccaggttggcatagcaacaacctttattcactaggccatctcactggctggccctcttatatttttatttttatttattttatttttgaggcaggctgttctggaatttgctgtgtggcaaattccagctggcctggaacttctgatcctcctgcttaagcctccttgtcatacacagtgctgcaagcgtgcctcctaacacctggcttcaagcagtctgtttccccttcacacatgttttcccatggtctgtggcccttcccataaattctgtacatagcttacttgtttatatcctggtagtgttcattgtcttggttctctcctctggcagggacgtgtgttttcttcctagcccagaacaatgtctgtttctcctagctgataataaacatttgtggagtgaaggagtagataattaatttttataagtctaacaacactatcaataaataaataaataacacctttttgtttgggtcactgttgtctttgaatatgacattcacctggacaggggcttgtgctgacacctgtgttaaccttatgagttctaagagcttggttctcagccttgcagatgaaaatgagcagctgtttcttccatctgcctctcccctgtctgagaaacataccatggcccatgcatttgctcctgaagactttatgccctgaccatggcaggatcctgttgtcggcttggtgctttcctattaggcttgtcactctctgggtcccctctgcatatggcacatcagcacatggtgccatgatctttgatggttgttgacatgaggcacctgaaacttaccttcgaaggttgatccaatggcaagtgacatccatgacctgggagtcccacccatattgcctgaatctaagtatgcaatttgtaatatgactagactgacaccccccgccccccgagacctatgtatgtgtacatccaagttagagcacatcagctgtaaaacacagtagagactttcatttccagcacacagaggtcacacgagtgatctccagttggaatgtggcacagtgaaactgcattcgatacttccttgccagcagatactcacttgctgagcgcctgctgcctgtaaggtgatggggattgatgatcgaatgtccctgtctagagaggaagagtgcaacacgagggttggcatctcgccaagcgggtcaccctgcattgcaggagtgatgagattgccagcataatcattctgatattgaactctgcacccctaatgctacccatcagggagacttgatcattggcacagattcaatcaagcagccttgtgtctcggcctgtcccacagtgggataaatcagatgagagtcaccaaaaagagagaaggtctggttgcgtgtggtatggtgtccacttgagatgttttcgacggtttaagatgaaacatttccagagtaaaaaaataataataataataatgtaagagagagtcaccagccaagtaattacaaaccttctctctctccattttgcttgcaacagggacgttttgccattcaccttgaagctgccttatgccatttcaacagccaagacggagtctcagcttgaagaactagcccaactgggactaagtaagtgggtgtccgtgcatggctctatcttaaaatgaatcccttgtggccccatgctacatcaaaaacacttgtaagaatctcacttccataacaaaatgcagctcatggaaccatgaggtccctgagtcacattttctaggattcattacccaatgcccatccgactctcaaatactggagctaagtgtgcctcggtaacccctaaatctcctctcatcaaactagcagggctccccagaagtagtgagctcagcataagcctgtttgagatgccagagccttcccttcctgtggcgtctttctggggaaaggcagcactaagggaaagagaggtgcagtgtggggcttttatcctcagtggtacagaggcacctctgctactctggtgctgtgaggagagtaaggatgaagatctcttaatgacacctgtctcttcccctcttaatcagctatacacacacacacacacacacacacacacacacacacacacactgctgtgggccatgtccctcatcctacctaaggtcctttctcaggcaggtgggactcacttctgaagtctgcttctgctagtcgccccacccccaccccacagcaagattctaccacacagtggctgacaatacacacagttcacctggtttgactttactccaatgctctggcagaatcagtatgagtttaactttagttaaaatattttcctcctagatggaaagagaattctttttaagattttaggactttggtttttggataggttgacaatcagactgcacagtgtttgatgtctagaacctaatatgaccccccccacacacacacacacactcactcacacacacacacactcactcacacacacacacacacacacacacacacacacacacacacacacacacacactcactctgtatccctagcctaccccctgtagggatgggacccttgaatgccgttttccctctttgttgggttttaatgctgaatctgtaaaaccacaagtaggttgtgtaatatcccccaggcccagctgctggtcctacctcataaaggggaacttggaggccagatggattccttggctggccgccgcctccttggagggcacccgggagaagtagattggaaagggtggcgttgctctctaggctaagtgggattttgaaaagcacaggctcagtagttccgtgtcctttacgagcttatcctggactcattccagttttctttgtccttcttacctgtgtgaagggctgggctggagctgcctgttggctcagccaacctttctcaaaggttttgaaggtgagaggcccctggtggcgtctccctgtgaacccatagctgccttcatgccctttccagtaagagaaagggggggcggggaggggaggaggatcaaaggaaaaaagcagaccccaagttaagcccctgttgccccacagtgtgtgtgtgtgtgtgtgtgtgtgtgtgtgtgtgtgtgtgtgaaggaatgtcccaagtgcactatatttannnnnnnnnnnnnnnnnnnncccacagcaagattctaccacacagtggctgacaatacacacagttcacctggtttgactttaccccaatgctctggcagaatcagtatgagtttaactttagttaaaatattttcctcctagatggaaagagaattctttttaagattttaggactttggtttttggataggttgacaatcagactacacagtgtttgatgtctagaacctaatatgaacacacacacacacagacacacacactcactctgtatccctagtctaccccctgtagggatgggacccttgaatgccgttttccctctttgttgggttttaatgctgaatctgtaaaaccacaagtaggttgtgtaatatcccccaggcccagctgctggtcctacctcataaaggggaacttggaggccagatggattccttggctggccgcctcctccttggagggcacccgggagaagtagattggaaagggtggcgttgctctctaggctaagtgggattttgaaaagcacaggctcagtagttccgtgtcttttacgagcttatcctggactcattccagttttctttgtccttcttacctgtgtgaagggctgggctggagctgcctgttggctcagccaacctttctcaaaggctttgaaggtgagaggcccctggtggcgtctccctgtgaacccatagctgccttcatgccctttccagtaagggaaaggggggcggagaggatcaaaggaaaaaagcagaccccaagttaagcccctgttgccccacagtgtgtgtgtgtgtgtgtgtgtgtgtgtgtgtgtgtgtgtgtgtaggaatgtcccgagtgcactatatttacattcttgtctttgctgataatgacttacagatttttggagctcctcggcagacaacaaacccctgaactccccacctccccataggcctcttccctcagccggcatctgccctgcctccttgcgtcagctctgccttataaatggagtgcattctataaaaaccaggacgccttcggagctggagtgcagccagaccaacggagccttgtgttttattaatcctcttttcttgaaagtgcacagccaggacctcagcacaggcccaaagcggccgagcacaaggactcccaacgcgaatggcaccgagagacctcggtcccccccacccaggcccccgccacccgctattaatagtctgcacacaagccctgggctatccaggactgaaccccagacgagcatgccagaaacagtcaaccatagcaaacatgggaacgtagctctgcttggaacaaaaccaactcccatccctccaccccggctgaagaagcaggcttcttttttggaagcagaaagcagcgccaagaccttgactgcccgccggcccagccggaggtcggagccggagcccgagctagagctggagttagagatgggcacagctgggcacgcaggtggagccccgcctagggacgcccccggggattgcacaagggcgccgccgcccggctctgaatcacagccaccaccgtgccatggagccaggcagaggctgagcgacatgagcctttccacttcctcctccgactcgctggagttcgaccggagcatgcctctgtatgggtacgaggctgacaccaccagcagcctggaggactacgaaggggagagtgaccaagagaccatggcacctcccatcaagtccaaaaagaagaggaacagctcttttgtgctgcccaagcttgtcaagtcccagttgcgaaagatgagcggggtgttcagctccttcatgacccctgagaagcggatggtccgcaggatcgccgagctgtcccgggacaaatgcacctattttgggtgcttggtgcaggactacgtgagcttcctgaaggagaacaaggagtgccatgtgtccagcaccgatatgctgcagaccatccggcagtttatgacccaggtcaagaactatttgtctcagagctctgaactggacccccctattgagtcactgatcccagaagaccaaattggtaagtgcccttctacccatttcaggcataaaatgtactgtaacccttgtcagccggtgtgtcctgttagttgtctgggatgaagtttaacctggagttccaaatgacacactctcccatctgaattgaatggaaagatctcccttttttaggcagatgctacacaccaagcttcagatgtttagaactgcagaaggattctatccaggggtgggggttgtaccactttgaaaggtcccagttgctgcctgctcttgctctatgcgtgtgacacatctgttgagcattttctggctgtgcgtccttctgtaacctgcatgcttactgacagtatttttcactgtctttccagaggttgtgggtgcttttgttttgtagcatatgctaggagtatgaagactaggggcgaggtggggggagcacacctgtgtccaagccccccaacccagagaaaagaacacagaccaaccctcagggaccttgttcctgtccagcctcaagtggacctccctgttggttttcatcctacagagtctgtattaggcagtgtgggaagaaacaagaaataggaaagagaagtttatttggtgtacctttaagtgacataattcgaagatcacatgaaaggcattctctccagagtcaaggggaaatgctttctttgtaacctcacaggagagctgaattgttactttggtaagcatcttgccaaggcaaatttgaatttggcaagcagtctttttttccagggcgggagtagccagggtttttgtagttgttgttgctgctgctgctgttgatcgtgttgttgttttgtttttgtttcacgcattgactcttaaaaggttaatttcagagacttcactcagtgggcagcaacagccaagagtttacaaacatttccatggtttagctaaactcagatttcttctttctgattgggtgtgtttgtcaaaagtagtaaacagtgtgtggtagagcatgtgtttctctctctctctctctctctctctctctctctctctctctctctctctctctctctctctctctctctcaatttgagcagctctttgatttggtcacaaaagactcaaagccttgtttgttttcttgtgggactctgacctagcccagggttctgtttgggcgtggctaaaggagctcgggtgctccagagaaagtggctgaaaggaatgtgcctttgtgctacgcctaagaatggaaatcattttcaggagacttctgcagaatgcagaatatccacacaagttccctctttcccctgcagcccgagagtcttttctctcctgaagaccccttccaacatcatgttcacagggacccctagtaagaaaggaaacccatctctatagagcctcccatttgaacgagaagcctggacaggctgcttcagtgagcgctctcctccccttccgtacacaccctagtcaaaatgctttctatctcttgaggaatggaggaaggcagattgtatgccagcccacaccatctagtagctggtaagttcagagcttgaactggtatgaagctctgtacttagtggcccagatcagcctcgaaccgccagttctccagcctcagctcccaagcccctgcggtgccagccctactgcatgtgtttgtcctatcattggaagagttgtgacagtttgctagccctatgctgtggctaaaacatatataaaaaaccaattccaggacaaccagggctatacagagaaaccctgtctcaaaaaacaaaaacaaaacaaacaaacaaacaaaaaaaacacaaaaaaaccatcaaacgttgtgcttttctattggttttgctgttgatttgttggttgtttggttgttcggttttgttttaagtcagaagtctaactgtatttcttagcctggctgcacagtctagagtccagtcaccctgcttagtttcagggcttgctgggagtacagagatgtgctgccatacccagcctgctttgggatgttttgtattttcttaacatttgcctgaaggcgggcagtcttttcctgttgcttcatgaatgaaaaccatagtgttttgaaaggacattgaagaacttttgaaagtaaggagaaggctagtgttgcagaggtcagtctgagagccacaccaagggggaagaagtcgatcctggttattagaaagccagtcagtccccttctatgtggaagtgactaaattaggactctgatgagaactttgagttaacccgacatttccctatgttgaagggctgggtggcttcctatggacttgttgatataaagacacttttgagactctttaaccaatattggtatatttctgcatatattgttcagcatttgcaagttccaaaagaggccaggttgtgtagagctatgtatgggcctggacctgtaggggagtggtatgcagcccaggtcttctgatctctggtgctctggtgagtgaatgtgtgtgtgtgtgtgtgtgtgtgtgtgtgtgtgtgtgtgtgtgtgtgcgtgtgcttgttcgtatatgcttgttcccatatctcactatctcacgtcctggaaggaatgcagtaatcttcgttgtaagctatctgcagaatctcaagcctcaaatttgttctgaacaggtgtctgagtacggagaaagcttttcaggaatgtcatctgggtttctctgcttcaaaagaatttcttcctgtcttcctttctcacaacttctgggggaccaaatataggagatgggaattctaacttaatcccaaacttacagaaggttcactccgaagccaaggaagtgggaggaggtgtttcatgggttaatccctggagaatcagagctgtcattcacaggtgaagtgacctcatgaattctgtggacaaggatctcctcggtgtgtgccaccagtgctggtaccgccttccaagactggttctttaggagatgggtgggtgggaggagaggtctcaaccgtactcactttgttcaagtgtctactgctctccttttgagtgttttctactcaagtgtcaagttttctttttgcagtgagtcaatgtcaaaataaactgtctgtggccatgtcctaaaatggggaattttcattctactgagactgtcccaaagccctgccctttagtgggtcttgagtatatataattgcctggcatcagcttggtaagtctgttgaacaatggcattaatgagggtgtgcccctctctcccttctttccgagcccaccaatgggctttcttctaggcagctttcactcggtctcccacctcccaccacgaggtgggagagggatgaacaagccagtgtttttaaaaggacaggacacacttcaaggctttacctaaagctctgcagtcagttcttaactggcagagggagtcagactcctaactgggatcccatggtataaaggaccacagtggatgagtgtgaccatacgtttaccccaaaagtcattccttgttggtattcttgctttggtttctgactgccaatgagagagagaacccatattatcttggtttattttttttaatctatttatcaaacttatagcaatattgggagctttaattttagtagaacggtctttcccctttgacttggtatcagccttggggaactcttcctgtctttaagtttcatttcaagaaaagcaaaatttgtctaactctgaaaatgttagtagccctcagagtttctatttcaaagaaaatgttcaccacagatgactaattctggcaaaacatccaactctccatattcctaacaattagcagtgaaaaacgagacaatatcatgttttctttaattgctctaaactaaaacatgctttttttcaaagagtatttcagttctttgaagaagcatccttaaactcaattcccacatttgtcacagagcacatcgatttctgtattcaaaagtgattttggccgggcgtggtggcgcacgcctttaatcccagcacttgggaggcagaggcaggcggatttctgagttcgaggccagcctggtctacaaatgaattccaggacagccagggctatacagagaaaccctgtctcgaaaaaccaaaaaaaaaaaaaaaaacaaacaaacaaaaaaaaaaaatgtgattttgttttttgatctttgttggtttccccggagagacagtgctgaaatgtgtttgaactgcctagaggaatgaagaactcgtaaaaagggaacattgagagcctggtgcagggacactcacctacagtcccagctataggaggttgaagcaggaggattattttagccccagggtcagatgtggatctgggctacctagtgagaaaccccacctctaaaaggggaggtcccacctctaaaaggggaggtcccacctctaaaaggggaggtcccatgtcacttttccaagttaagcaaccactgctactttggttcagagtctgccaaaggtttttggtttggtttcgtatcacttgtttgttttgagtgaagccattgtgttttgttttgtttttaatgtgtttgttttgtttcatataggggttccagttttgttttgtgggggagtctccattggctttgaatttgtaatgtagaccaagccggaactcattatgtacagtctagagctcactaggtagaccaggctagaacgcactatgtagaccaggctggcttcaaatatgtggctttcaccccagcctctgtttctgcctctcaagttctgctgattcggtgctattttaaatgcgtgttcaagtccggcacaagttccaatgtctcatgtaattatcgtaaattcacaatgggatttaagaccttaaattatttgcttcttaaaaagccattctgagtcatgtggtgagagggatgctagtgccaaactgagattaaaaccttgtatcttctgactgttcatctagtacttgtgactctgtcacctgaaaggatcaagtgtcttagagttaggaattagtacagtaatgggagaaagagtggccacttctagaatttgaaaaaaatgcctatattattattgaagattagtttaaatgctaatttttattttccacctcagtactgaggattgaatttagagcctggcacacagtaggcaagcataaaccctcatttttctttttattttgaaacaggggcttaataagttgcctgggctggcattgaatttattctgcagcccagaatggccctgactcatgatcctcttgtctcagcctcccaagtagctgggattacaggcatgtaccaccaaagttcagcttcattcttactttagaatatcaaaattcagtccgttgtgttatagcagccataagaaggctcaccaccccgtagctgagagcctgtgagcatacgtcagccactccatgatattccacccaaggagcctccaactctgccatttccaaagccctgctcagaggttcaaagtgtggatcgcgttacagagcaaggcatgtctgtactagatggtttgctgggctagacagttctgcctcttgggcaagaaaccccagggaaaagaggagtttgtactgaactgaagggtgtgagtcaggggccctaagttgccacactgattgactagaagaaacattttgctctcccactacactactcacaaagagaataattccaattggccgtgtcagcaaagtgggcggtgcacaggctgaggcttcagtggtctgcagggctgacctccagcccagtctcacaagctcagcgtctgagcaggggacaggcgcacttccccttcttccctgccttggtttttttctgatcttttactggaaggcactgaaatcagccctagagattccttatatgagatactacctggatcaagcccatatgttttcatggtggccttcactgaaacttaccaaatgggcaaaacttaaagtgagatgctcgggaaagtgactgactaattgcatgcactactccttcagtgaactcaagttcagtccccagaactcatctcgggtggtttaccacctcctgtaagggatttgatgccctctgctggcctcctggggtacctgcacttatgtgtatatacccatacacagatacacatgaacacacgtaattaaaaaaaaaaaaaagagtaagtgaatcacaatgccagtacttgccatttgtctattgataccttcttggctgggctggtaaaaagcgttatggtggaggagtcgaagtgcgtgtggatgacgtgcctatggcaaagcatatgttccaagacaccccagcagagctgcaggggagactgtcccacacctggcaatgatgccatcagcagtaggtatcggtgatcttcaggagtaaggagacacatcattatgtcggtacccaagggaaggattttctgtttaacacttggatatatgttacctggaagatctgtgctgagtcagttccagtgacgtttccctaggtgagatcttcagaagagttcctgtcagggaaaaaaaaaaactaactttcccagtgtcttggcaacggccacagataacactgagggctgaggctgctgcaatgagagagttgggcgaatggaaagtgtcattggaatccaagctgcgaaaaactagagcagacccaggaggagcttgtgagaaggtctagaagcacagagagaggtcctgtccggtcctagagtagacagaatggagtaggtgcagccatgtaatctgggcttctccagtcaccccacccaaacctgcactagtgatgggttggccccaccctttgacccacactcagtggaaggcttgggtatcctcctagcccctgcactgtgccatgtttcctcatccgaaataaggctgggttcacttccccggctgggatggatacatgaccacccaagatatctaactctctcttctttccaccatgttagatgggaacaaaatgaggctgtgataaaactctagaagaaccgaagcacagagaagctagaaagcctcggaccctcagttttttagcagaggggaggagctgacagggatgagtaactgagcaagggaaggtagtgaccaggaaagcagagggcttttaatctaaccacaattaatattaaaatgcaaaacaaccccccccaacctgactccatagacctggagtctcttcagaagcatcacctgttccaagggaagcgtgaatttagcatccttagtaggtacccaatgcacagtgggtactcatggtatgggacctcaccaagtcctctcagcagttctgttgtgaagctggggaagcctgataacagatgagagaactgagccaggggaaagcaattctccctcaaggacacacatttaaagagtggacatgtatactttatgcctatgtcaggcaacctcagtaaatagccttctgcttcccttggctacacactctgctgagagaaacttctccgctgaaaggcgggagtgcgggttgtatcactggaaaagctgaggccagacccctgggttgggagtctctgcttgatggctgatcacctgcatgtgtgttctggtcacagcacctgcttgccgccctttctttccatataacaaggtgtggtgtacgtttctgtgccttgactcttgacacttgctgcccatgtgatattcagtggttagaactcaagacatctggcttcagactttctcatcctactacagtggttttccaggtcggtggggaaggctgagaaatgaatgcccactctaccctctagacgcagcagctagaaacacttccaaggtacctcagctcagtatcttagaatcctcagctgccttcagttgttacagagcctcctattggttgttctccttccctttctgggatcatctatgctggccaaccacactcaaacccttgtcttaggttcaccttctgtgagaccctcaagctaagccagccagggattctgtgcccattttagtcagggctgttgaaagccacacaaatgctcaacccacactagtcttcacccaggctccagtcctctctctaacaatcccatcaaagcaatgtgtgttagtgcatgagaaaaagacatctcgattcactgtcaacttattgcacaatggaaggcccacggtgcatctgtccagatcctgggaaaggagcaacgtactttatgcctcaactcccacttccttggactagcttctaaacttcagacccgacctgagaatgacctagttcttgcttgacagggctaacaatgagagttcacaggtaatcctaaaacaggaactacacagacaagcaccagttgtatgttagaactgtaaatgtttaaattcaacaacccaactttcctacaaaagcgcctcagattgctatcaagcgttagtttctagttctgacactttcatcctttttaaataaccagagttctagggtgagagtcaaccaagaagctgtataagctaatttcccattatctttgtcaagtagctttcttggtatttcttttaccgagaaaaagcctataagggttatagcctaagtctgcctctgcttctgttccctctgcttcctggtcttcccagataataagcaagtagacactgagctcccactgacagagatagaaccacctcattcaccacgatggactgtgcaccctcaaactgcaaaccaaagtaaacccttcctacctgaagacttttttctgtcaggtattctgtgactgtggctagaaaagtaactaagacaaggactcccaatccatgttatttatttaaactctggttactgttagaatcccttcaaggatatcaatcgccattttgtatcatttaaatagtctccagctcattcaggctcagactaatggttagtgtatgacattgtgtgaaccatcctgaacattctgaagagagtctggatgttaacagtaaaaagtaaagtcagttggtcatggccacttaagaaggtggagctggactggtggctgggtgtaatggcctcctgtgctgcttctacgatgggcttcattgcaagtcacccttttctctggggttctcatggctgcctggccagcagtgggtaagcagaaagctcacaagcaaagccagtgttttatagaggcagacggtgtttcttctgctgtctccaccctctgaatatatctgtagctcagaccgatggtaaaggggaagactctttctcccctcttattgcttgttttgaaacacagtctcatggagctcaggttggccattagattgctacatagctgaggctggccttgaacttctgacccctgctgccttctcccaagtgttctgtctctctctctctctctctctctctctctctctctctctctctctctttccttcttcctttctttctcttttttaaagatttatttatttattatgtatatgagtacactgtagctgtcttcagacacacaaaaagacagcatcaaatcccattacagatggttgtgagccaccatgtggtggctgggaattgaactcaggacctctggaagagcagtcagtgctcttaaccagagccatctctctagtccctgtctctgtttcttcatagagagtgaatcaattgttgcctaaaggccaacacattgaatatttttttatcaattactgcattagttagcaatgagacaaggagaaccaacatagtctttgctgcctcccacttagggatagtctatgggaccagttgattggacccctgctttcataaaccttgtttccagtttgggtcattcagaggctacagctaatatacagttttcaaggtccaaaatattacagttcaaacagttctttggttcattctttcttttcaacaggtcaacaggatttctctagccctggctgtcctggaattctctatgtagaccagattgacttcaaagtctcagagaataggcagtctttgcttcctaagtgctgggattataaaggcatgta

SEQ ID NO: 1493 - DNA, 1670 bp, Mus musculus
ctaggaagagtgctggccgcggcaggaaaccgggctgaaaggagatgagtccccggcatgttgtagagcctcgctgggggaaatgtcagcgtggaccatgggcgcccaaggtctggacaagcgaggaagtttctttaagctcattgacacgatcgcctcggagatcggagaactgaaacgggagatggtgcagacagatatcagccgggaaaatggcctggaaccttctgaaacccacagcatggtgagacacaaggatggtggctactctgaagacaaggatgggaagacatgtccccgagactctggctatgacagcctctccaacaggctcagcattctggaccggctcctgcatacccatcccatatggctgcagctgagtctgagtgaggaggaggcagcagaggtcctgcaggcccagcctccagggatctttttggttcggaaatcctccaaaatgcagaagaaagtcctctcccttcgcctgccctctgaatttggagcacctctcaaagagtttactataaaggagagcacctacaccttttccctggaaggctcaggaatcagctttgcagatttattccggcttattgccttctactgcatcagcagggacgttttgccattcaccttgaagctgccttatgccatttcaacagccaagacggagtctcagcttgaagaactagcccaactgggactaatgcacagccaggacctcagcacaggcccaaagcggccgagcacaaggactcccaacgcgaatggcaccgagagacctcggtcccccccacccaggcccccgccacccgctattaatagtctgcacacaagccctgggctatccaggactgaaccccagacgagcatgccagaaacagtcaaccatagcaaacatgggaacgtagctctgcttggaacaaaaccaactcccatccctccaccccggctgaagaagcaggcttcttttttggaagcagaaagcagcgccaagaccttgactgcccgccggcccagccggaggtcggagccggagcccgagctagagctggagttagagatgggcacagctgggcacgcaggtggagccccgcctagggacgcccccggggattgcacaagggcgccgccgcccggctctgaatcacagccaccaccgtgccatggagccaggcagaggctgagcgacatgagcctttccacttcctcctccgactcgctggagttcgaccggagcatgcctctgtatgggtacgaggctgacaccaccagcagcctggaggactacgaaggggagagtgaccaagagaccatggcacctcccatcaagtccaaaaagaagaggaacagctcttttgtgctgcccaagcttgtcaagtcccagttgcgaaagatgagcggggtgttcagctccttcatgacccctgagaagcggatggtccgcaggatcgccgagctgtcccgggacaaatgcacctattttgggtgcttggtgcaggactacgtgagcttcctgaaggagaacaaggagtgccatgtgtccagcaccgatatgctgcagaccatccggcagtttatgacccaggtcaagaactatttgtctcagagctctgaactggacccccctattgagtcactgatcccagaagaccaaattggtaagt

SEQ ID NO: 1494 - protein, 554 aa, Mus musculus
  VARIANT (1)...(554): Xaa = Any Amino Acid
EECWPRQETGLKGDESPACCRASLGEMSAWTMGAQGLDKRGSFFKLIDTIASEIGELKREMVQTDISRENGLEPSETHSMVRHKDGGYSEDKDGKTCPRDSGYDSLSNRLSILDRLLHTHPIWLQLSLSEEEAAEVLQAQPPGIFLVRKSSKMQKKVLSLRLPSEFGAPLKEFTIKESTYTFSLEGSGISFADLFRLIAFYCISRDVLPFTLKLPYAISTAKTESQLEELAQLGLMHSQDLSTGPKRPSTRTPNANGTERPRSPPPRPPPPAINSLHTSPGLSRTEPQTSMPETVNHSKHGNVLGTKPTPIPPPRLKKQASFLEAESSAKTLTARRPSRRSEPEPELELELEMGTAGHAGGAPPRDAPGDCTRAPPPGSESQPPPCHGARQRLSDMSLSTSSSDSLEFDRSMPLYGYEADTTSSLEDYEGESDQETMAPPIKSKKKRNSSFVLPKLVKSQLRKMSGVFSSFMTPEKRMVRRIAELSRDKCTYFGCLVQDYVSFLKENKECHVSSTDMLQTIRQFMTQVKNYLSQSSELDPPIESLIPEDQIGKX

SEQ ID NO: 1495 - DNA, 136156 bp, Homo sapiens
ctgaaagatctgacttctatcctctggtttatcttcaggtcgtataaatcttttgccttcgactgaaagatttgatttctgtctactctctgtgtataccccaatgagataataaaggggtagactataattcaaaaaaagggaagaggagagaaaaggaaagactcctaactaagagaatagggcttaactggaaaatagggcctatggagaaagccttggttaaaatggaagcttccagatgtagggagggctcatgtagagagaggtgccacacagactatgatggcataacagacaggcgaaatggggatatgtgagtaaaagccctttataaatcaaaataccacataccggctgggtgctgtggctcacgcctggaatcccagcactttgggaggctgaggcaggcagatcacttgagatcaggagttcaagaccagcctggcaaacatggtgaaatcctgtctctactaaaaatacaaaaattatctgggtgtggtggcgggtgcgtgtaattccagctactcaggaggctgaggcaggagaatcgcttgaacccagcggggcggaggttgcagtgagctgagatctcaccactgcactccagcctgggcaatagagactccatctcaaaaaaaaaaaaaacaaaaaacaaacaaacaaaaaaaacaaccacataccaagtgtactggggcattcattcttttacagccagacccacccatttggattaggccagtcaggactgcgaagaggtcagtttggcccagtttgctttactgatttcagcaaaagcacttacagccttctggaggagagtaagaagataaggtcttcaggaagataaaagcattaacttctaaccttcccccttgctggagatgctgttacaaccacccaaagagagggatgccttgttttaccaagaaactcagcttctgggtgattctcaggcatgttatctgttttcctattatctgcagtaactcgaggtcaatggatgctgattgcagagggttcataacattaccccagccccagagaaagtgtgcatatctcagacacaaggcagaggtatttttcagtgcttactggatgtgttttgactcccaagagaagaatgtttggaggggaaaggcatctggtttggaactgagagcgaggtttcagaagtctaagacagtgggtccatagtgcagggttatagtgttgtagactcaccccgtgaaagagccataaggcagaggaaggagcacaagagccaggatgcttctcaggagagagtctgacctctttgctggaattcagagctagagagaaattaggttgcaatagggctgttgaacctaagcccacctgctttctgcaagtgccacaaggatgtaactaggcccacacaggaccgaaccttatacttttgcaaaccaggattggatggagggtgggagaggactaaaagcagtggtggggctgggcacagtggttcatgcctataatctcagcactttgggaggctgaggtgggaggatcgcttgagcccaggagttcaagactagactggacaactgtagagacccctgtctctacaaaaaagtcaaaaaattatccaagtgtggtggtgcacacctgtagtcccagctactggagaggctgtggtgggagtatcacttgagcctgggaggttgaggctgcagtaagccatgattatgccagtgcattctagtctgggcgacagagtaagagtgtctcaaaaaagaaaaatagtagcggaagctgtgtccattctgttgtgagccctaagatgatcctacctgccacccaatagtcccctaacacctgagatatgcactttgtcctatcctagcctcacccctcctcgtggaaggagaagtttttggagcaaacaagttgtgccagtcttgggcccacatcccctccctgcctcacccatgctcccaatgcccaaagctctggaatctcttcccgcatggcccaagcctgcttccactgcttggcaggatgtctcccaagcccctgggcccatgggctgactctgctcctggagtagcatccataggctgaaaagtgtgggagggaataaaggatgcacagcacttggacatgaaggatggggtatccacagagctattggagggagaagaggtgtaacaaaccagggtcaccccatgtccccatgttcagggacaaaacacggacgagtctgagaattttaaatttaaaccaggtttcccaagtcctcgtaaaggcacatttgtcgtggtaggagaatagaacatactttagttaacagtttgttctcttgatgtataatttttttaatattcagacataaagtataagtgaacttccatctgtcctcttgcctcagtccctgaaaatgccagtgtccacccagcatcctcatgggtggtacgaaaacccagacacaggcaatgatgctgtctctactgtcaactcagaccatccatccatgggcccactcgaccctccgtgctttactgttttccataatctaattcttttgctatcattatgtctcaaagcagtctctcttggacatgagtttgtacccaccctcaaatagtctcaatggataagaggtaatcctgcttcctcccctgtaccttgggctccatgctaaccacacctgccctgtctggccccactgccagaggaaggagtcagacgtctgaacaagaggatggggtgaggtagaacattgagaggaaaaccctaagcttcagagaacctgcagagcctagcagaaattatttggtagttgcaaatagtgcaaaactgaataataggaaactggatttgtgaaatatcctatgtccttgtcactcctaacaaaagacatgaatgccattggtcagccaagacagacttttaaacatgcctgaacttctgaggcacaattgctgccaccaaaaccacctttctggtgatggcaacagatatctctgagagcattacatggatttttatgactctttcatagacacacaaaatactaagttattttggagaactgttactttctttatgcttttcccttgctaatttctggagtctggttgtgtgatggtattaaatattaatacctgttatcggcacatttactatgtttagaaggtgtcatggtatgttgttattttgatattagacactgtgcttccgctgactgtccacatggaatccgtgggcttacaaggaagacattcttcagaggaggctatctgttctccggcccacttcctaagagaaagcatggaaattttaaggctctaatcctacaacacatggatgcaaagacatgcacaaacacacagcgtggtcaatttgcttcactggtcgatatatttcactgggagtttagcacgtgtttccgtggacttttttcattgtgtgatcttcaatgctgatgtgttgacttggacaaacacccggagacttctctagaattccaatttgtgcaaaaatgaaagggctgagaaacatgattggctagtggacttgtagagaataaagtaggtttgtatgctatagagagaggaaagatcttcagatcatagaactctgtaagaaaaatccaaccacagagagaacacatggactccctaaactctttcatttctttggtatttcaaagtggtatcaaaaaatatgtatttttttccagaccgggtgcagtggctcatgccatcccagcactttgggaggccaaggcggtcggatcacttgaggccaggagttcaagaccagcctggccaacatggtgaaactctgtctctaacaaaattacaaaaattagctgggcatggtggtgcacacctgtgatctcagctactcaggtaactgaggcagcaagacaattgatgaaccaggaaggtggagattgcagtgagccgagatcatgccactgtactccatcctgggcaacagagtgagactctgtcttaaaaaaaaaaaaaaaaaaatttccagcatgttttgtgggtcaacagcatggtatgtgtgttgctggcgtttatctgtcctaggaattcttaaagataagcatggctcttcctatcatcttatgctttagaggaagtcattctttttttttttttttttttttttttctgagacagcgtctcactctgttacccaagcaggagtgcagttgcatgattaatgcagccttgaccttccaggctcaagcgattcttccacatcatcctcctgagtggctgggaccacagatacatgccaccatgcccagctaattttctgtagagatgaggttttgctgtgctgctgggctcaagagatccttctgccttggcctcccaaaatgctgagattatagatgtgagctgctgcacctagccgagaaagtcattctttaaaaacccttctctttagcctagatgacttccttgtaaaatcctatgcacttactcattcggcaaacatttactgagcacatacgtaccaggcagcacgtaaggtattaaagacaccactgtgaacaagcagatgagatctctaatgtctggttccataaaggaagatcttttcttcttctctcttcaacctccatagaaatggaacccactaagtctaaaataacagaccgaacatatggcttcctttaactattcccgatggcagcattttacttggttaagatgagagccagaaatatttcgtgtcctactagtgacaaataatgtggtttcatggataaagcactggtttcagtctagagatctagtttcttacttttgctatcttttattacttaagtgtatgaagaatcaaataaaagccacctcttcagagaccttgtggtttagaattagtgaattaaatatagtggtgacctggaattggttctccctgctcactagagctgattgttaaaatttcatgaactttccaagtctgttgatgtcacactggtagcttgaaaccagccatgatgggagtatttacaccacaaaataggcaaatgctaaaacccggggcttttatttcccagaaagccagttgttaaacatttccctgcgcatcactaactaaagggaagggtaaacaccctgatggtgaaggggaaagtttggaaagacatcagcatatacatggtcaaaatgaaggaaaagaagcaaattagtacatgagattccaggcaagatgtatcctagaggctaatttattatatagggatgatgttcctctctttttccttcatagcactggttgtcatgacatttcgacccaaaacattgtattttatttatttattttttaaaagagacagagccactcacagagtcacccagtctggagtgcagtgctgcaatcagagctcaccacagcctcaatctcctggactcaagagatcctccctctttagcctcctgagtagcagctggaattacaggcatgcaccaccacacctggctaatagactcaggacattttcatgtaaccctgtggactttgtttatgttctttactccactaatgacataggctgttagtaaacaaaacaaaaaacattgtaagaataaagagtattgtgtttagaatttcaatactccattgctgggccaaagaatattcctagagtttctgtggaattgcttctactttcattattgactgtctaagaattacaaaatcactggtattgtagccatttcagaatgaaatgggtgaagatgcactcaacagaatttgtgatagatccaaacataaattgatgaattttatcttgcttgtaattttggaaagtgaaaaaaacttggtctgagaaaaatgatactggtagaagaaaacctgatgacagctgtcactaactacacccagtcacacttgttatgatggaacaagtgacggaagcatcagtcttacaaaattcggacattccaaatgtaacccagggaatttggaacttcatagaaataatgaaaacagccaacacctcacagggcaggaatcttaaacagtaaagtttcacgaagacaaaaatctttttgatcaatcacgtctcttttacaaagtttacaaggaaagtattcatccctaaaactattttctataaaattaaaattaaatgaatagctatatgaaaaaactgtcataccacacacaaaatccaaagctgccagattacaacctctaatgaaaaataatcacctacatagactcttttaccatcatggacagagagccttggaaaagaaagctctaaactcaactgctaacaggttgatgagtagaccctgaggaagtcccagtgtgtgtggcttctttgtccatgggattctgtggattacgggctgaggtggcttatgacacctctgcactgtattgcatgaagttactgcacacatatgttgtgtgaccactgatcacatggagcttttcgagtgaggaggtttggaaatattgttgacccttgaacaaaacaggttttcaaactgcactagtccatgtatacacgggtttttttcaataaacatattggaaaattctgggggagatttgcaacaatttgaaaaaaacgcacaagttgtgtagcctagaaatactgaaaaaaattaagacaatgctaggtatcttatgaatgcataacatacgggttaattggctgcttatgttatcagtaaggcttctgatcaatagtaggctatttgtagctaagttttgggggagttaaaagttgtactcagatttttgacggctcagaacccttaccccatccattgttcaagggtcaactgtatgcagacttttcaatgaccttgcgggtagccaaggggaagccacccctctttccctgctcaatcatattccaagtgagttgagtccatcagccctgaggcctgggccaccggtgcaggagaagccatcagtcaagagaggaataagggatgcctgcaggggtggcgaagagggatgcctcaggaggctaattcttaaatggcccaagggggaaaatgagggcattggataggaggtgagagaagcttcctactccagaaagagaggactttttttttttttttttttttagacctggtctctctctgttacccaggctggagtgcagcggagcgataatggctcccagcacctttgacctcctgggctcaggcaatcctcctgcctcatcttcccaagtagctgggaccctaggcactcaccaccatgcctggctcatgtttttgttattatttgtagagacagggtctccctatgttgcctgggctgatcttgaactcctgacctcaagtgatcctcccacctcagcgtcccaaagtgctgggattacaggcatgagccaccatgtccagtcagaaaaggaggactttctaaccagcagaggagcccacctgttgccctcgggtggtcacatggccagtagctacatgggcaccagcagggcttctgtggtgtggacaaggtgagagtttctatgagtctgtgaaccagttttccaaggaaagaagggatggacttccaccagaattaaccccatttacaggccagtcctgtaagtggtagaaaggagttttaaccaccgcacctcacaccaccttgttaaaaaaaaaaaaaaaaggttactcttagaaaaattgaggcactggacattgttcctaattacatttttaaaatactttttaatttttttatgtgaaagatagggtttcactatattgtccaggctggtctcaaactcctggcctcaagcattccttctgccttggcctcctaaagtgcttgggattataggcatacgggcatgagccacagcacctggccaacaagagtttttaaataggattaggaccaggcgtggtggtttacgcctgtaatcccagcactttgggaagccaaggcgggaggattgcttgaggccaggagtttgagaccagcctgggcaacatagggagggagacctggtctctacaaaataaaaataaaaagatgagttgaatgtggtagcacacactggtagtctcagctattcgggaggctgaggtgggagaatcacttgagcccaggaggttgaggggcagtgagccgtgactgcagcaatgcactccagcctgggcaacagagcgagaccctgtctcaaaaacaataattaaaattaaaattaaaacactgttgttgagtaagggggctgggaatacagttctttccatatgacttctttctttctcgtaaattagcttgtcttttcaatggaaagttttcatgaccttcaaacttaaaatttttttttaaaatgactgttgggtgagggaaaacctgtgtcaaacagtgatccaagacactttaaaaatttctttcaattcacatagttcgaattgtcaagtctgatcctggaataacatttgtctgtccaacgtgtaaaatattgagtaatacaaagataattatggaaatattcagagaacttccctggacccagacacagagccacctccatttcctcctacctctcttagaaaaaaacaaaaagcattaaaaggagagatgacctgtctccctgggagctggttaagcgaccaggcaaaaaaagtgagatgcatttcttagattcggacttgacctgacaggtcctctagggtgagtcactttttcctatttcagtcaatttggctgtaaaataattacaataacgaggtcttgtttactgagactgaagtccgtgctgcccggcctcatttaacggctagaaagaaaaactgaaggttgtgattagaaagcttctgtagccaacctcatgcagcacggagatgagaatccaggacttgagtacactaagtgtctattaagtcagaactgtgagtagtggaatccaatataattgcttttgctgcttcttttgtgggtttgcacttgtgacctaaagtaaataaaatagcataaaataggaagctggggtgggggcaagaggagaagagattgggccgatgttggtcaaaggatacaaactttcagttcagaaggaggaaaaagtccaagagccgtattgtgcaacacggtgactgtagttaataccaatgtattgcgtatttgaaaattgcggccgggagcggtggctcatgcctgtaatcccagcactttgggaggccgaggcaggtggatcacttgaggtcaggagttcaagaccagcctggccaacatggtaaaaccccacatctaccaaaaaatacaaaaattagccaggcatgatggtgcacgcctgtaatcctggctacttgcaggctgaggcaggagaatcacttgaaccctggaggcggaagctaaagtgagctgagatggtgccactgcactgcagcctgggtgacaaagtaagaccctgtctcgaaaaagaaatacaagcaaacaaacaaaaaaaaaaacgaaaagaaaagaaaattttcgaagacaggagattgtaagtgcacaagtgcactcagaacaaaaaaaagcatatgaggtaatgcatatgttaattagcttcacttagccattctgcaatatgtatacctatatatatcaagatgtcatgttgtataccataaatatatacgatttttactggtcaattaataaaataaaatccttcccccaaaataggaaggttacgttggactaaagaaattaagagaagaggagaggagcggaggggatgggaagggtggggaagggacagtagaggtgggcggggaataggcgacgggggagggcagaggagggaacaggcctgtccttaatccttctcaagctctgtatcttgccaagatctggcctgtggcccggcgcagcaaaagctgggaaaatgccagtgactcaacccagttccattgatcagtgaaatggaaatcggggactctgtgtttcaaccccagtcagccagcccacagccagggtccaggtggcagcctcagctcctggcctcagtggctgtcagtagaatgggttggggagccagcctccagcggtctcacatagcaggcaggcagtgcagcctggagcccagccaggggacgcaggaatcctttctgctttttaaggacagactttgctttaccacagcagtcgctcttggggccacacggaaagccaccactgagtttactataaagtgacagaggctggtgtctctaggagaatgaggaatagtcacttcctgcctttgtccattagcgccgaccaacgcgaccagctccgtttacattctttcagtggtgttgttgaaagggcttggcagctcccaaatgtttgcagtgtccttagtcctatgagggctgccttcttcttcttcttcttctttttttttttttttttttgctagcttttagctagtatctggaaacatctactggacatgttggactcattttctcaagaatccactttacccttcagggaagccaggaaaagaacaagcttccaaccggtacaagtctggaggaatttcacagcctctcaaactacggtaccctttttgtttcttagtctagcctgttactgggatggttttaggatgaagctgctggggtgacatctgtggggaggcatggggaagcgcaggtgaagagaagttatcgttttaaatggtattaaattgctgtcaatattgagtcaaggtgtctaaggttatggtttggggaagaaaactatagctaactatagctactacagaaagatcttaaaccagaactcttttggggccctgaagaacttttttttttttctttcgagacagagtgttactctgtcgctcaggccaaagtgcagtggtgcgatcatggctcactgcagcctcaatctcctgggctcaagtgatcctccctcctgagtagctgggactacaggagcatgccaccatgcccatctattttttttttttttaattttttttagagacagggtctcgctatgttgcccagactagtctcaaactgctggattcaagtgattctcctgccttggcttcccaaaatgctggtcatgagccactgcacagaccaagaactttgtttttctggccaaggactttattttttaaaataataataagctatgtactgtctgcttgaactattggatggccaccagcatttaatcccatgggatgtacctgctgctgcacctggcagtgtgttcctgtcacctgctctcatttccctcttggagcagcttatgaaggagagatgccacctgcatcttttgaaatgtgatggatctgcctgccctgagcagaattcaaactggatggtgaattgaggactgctggaggttaaagggtacacatgaagttttcaggcagctaattaaaataaactagtacatttctggaacctaaactgctccaatgctgtaggcaaaattccctgtctgccctggctcatcagaaagagtttgtatatggaaaacttcagaacagaacaaaggaacttaagtctggatgaggaatgaagtcttggctctcgtttagcaattcctgaactgccaggtgacatcaaatcccctgccgaagaaatgtctgaaataaaaagaattccagacattaggcctggtttaaaacagggtatgcttttttatttgtgtgcttctgggtctaaacaggtcatggtttgctccccaaggtgacagtgtggctcccattccgtccctagttctgagcatggcactgtgatttctttctggagttgctccaacctgtggccttttgctaatgagtgatgaaccccagaacctgaacttctagagtcagcaaaattgcacactgccttctcaggaggtttctggaacattggccttcatcccagcaggatcacaagtggaaagaaacacagggaagaccccgtcaaatctttaaagtggccacagcacggagcactgacacaaagagacgatggttctggaaggaggggtgggatgctctgtgtcactattgttttctagatgggattccgtgcacagatcatcacaactcactgtgagtgcaagcaggggtgtaaatcgtggggccgaaaaaaacctttgtgcaaagatccttgctcactcactgatatgcacttctcagctatagattcatgcttttccacttgttgaaacgtccctaaatatcgccctcaatgtcctgtttgtgtcgctggctctctgccactcagctaataatgaaacagcctcagtgaacctgcagcagcagctgccttagcttcagtgcctacccacccctgcagctgaaccactttgaatattccttgatggtgcaagagacagtctcactattcccttcactggccttcctctgtgtccgtcacggttggcatgagctacctcctgtgcatgttatggcgagaagggatgaatgaggaaagacagggtggttttatacttgatcctgggacagtcactgggtaaggaagggtttggggttgctcccccaggcccccctcaatgcgtgaaggcctgagccaggtcagctggcagaggtgtgtgtatgtttaacttagaactgaatgttgaaggctttgtgacccaaagggaagaattattgggatctgatgccctagcaggggaaattccaagcccaaaaagctacagttagaattcagaactgtgttgttaccctgcctctgagttttcctctacgttcagctccccttttgtggatgatcgtgaagctgtttacatgttgtcctcttccgtgaactgatccctgtaaacagtgacaggattttatccaaatatttctgatttctaagggaaaaatagagcaatttcttcccagtgcccttctgttgaccttgcctgggggagaggccagcagagctaaggatgacctcacccccttccagcaggatttcctgggatgtacagaacctccttcttcagctgtccctctgtgatcagccacattcaatctataaacttccagtgcagatgatggggacatctaatattgggtctgttcacatttcagcaggaggtgaaacacacaaagtaatcattaggcttcctgaagtcccaaggaccttctacgtcagtggcagaggtgggaggtgggctggcgaggtggggcagtctaggaactgcgctggtggggacaggaaattgggctgaagggagatgtaaggccttggtgggaaataaatggcactgtgttgttgacggaaaaagatcttggcaggactgttgttgtgagtgttctgtggcttagaaaggaatttcctacaggctggactaaccattaaaaatgtctctaccttcaggagtccccggcgtgcagtggagcctcgctgggggaaatgacagcttggaccatgggcgcccgcggtctggacaagcgaggaagtttctttaaggtaaaaggaagccttgattgggatctcaactcgtcggcttgctgcctgagcctgggagctgcggtgctccatggagctgctgagggaagtctgctctctgagccagcaccggctaagggagcttgcccgagcccagctgctgattgttaccagggcttataacaggttgcggggtctgtgatttagtgctttcatacaggcacaggactcgggcacggagaggggccgtgctgtgcaagacggctgaggctgtctttatttgagagctgctcagtttgtcctttttcagctgcagggttttatggtggaagctgtactttgctttccagtgaatcaatgctgtcgtccatgtgttctctccttggcttgtttgtatgaatcactgaagggctccaaaacaaacaaacaaacaaacaaacaaacaaaaaacagcttcctggaccgcaccttagaatgatgaaatattattttctggtatattttatcaaacatccccaaaggcttcttatgataatgaggaagcatgattataactgtctaactcttctgtgttcatattgatgttaatgggactaaattaccttgctagcttaatgagataagattttaaatgggtgttttatgtactctgtgtgtgtgtatttaatgaagacttggtggtcgcttctgatttacacttgggaatcaattcccctcttgtggctttttgctttgtttcctttcattcaccctcgaattaaggcatcctcagtatagaaaattttgaaaatacagaattatgtttaaaaaggtagaaaaatggaggtaaaatatgcacttgaaatctgtcataggcagtgttccaacaccaggtcttgtcctcagaggaggaagacggaggagattttattaccgaggacaagtgactatgtttaacaattaaccaacctttatgggttggaagtatctattaacacttatttacatgtttcctgtttccaagagaccaaaactgatatattgtgtcaactgttgactctccaaaaaaaaaaaaaaaaaaaaaaaaccatcagaagaacctgctgataaagcaaagttcatgagatttactgaaataaggaagaacatcaccaggacacagtcttattcatgtctaagccaggggagattaagaggcagatttataggattcggggatctaggcctaagtccttcaagctgcatttttcaaggtggagaactaatttgatttcagtgacgtctatgccacaatagcttgggactggtggatacagcaagactagtatattgaagtggctcttgacaagtaaacccttgtttgataagtgagctgttttcccaggtgagcaaattgcttgccaggacaaattagtgtgtagacatttcctgcaacaaacagtgaagttatttattggtttacagtcttaattttctgggcaagaagatcctggaagaatgagttacgttatgttgacacagatggtctcaattatcaatcctaatagttaagctttgtggacaaagtagtctcagttctcaaatgatttactcagttttgatcaaacctgtataacctccacccattggaggcaaatgagagtaaggagctcctcaagtcctctgtagatcaagagctaagcccaccaggttgcccaattgtcatcctccaggttcctgagttgcatctgatgctgagatatttatttccccctgttaagagggatgatccaaaacctctccttaacccaaagcactgtctagatcagcctaaatattggctagtccataattaccaccttatgatggtcaggaagcacagtggagccgtatcttacatagtagttagattttaaagtcaaggcaaaagaagaaaatggaggccagccatggtgcttcatgcctgtaattccagcactttgggaggcctaggtgggcggatcacttgaggtcaggagttcgagacgagcctggccaacatggcgaaaccccatctctactaaaaatacaaaacttagctgggtgtggtggcctgcacctgtaatcccagctacttaggaggctgaagcaggagaatcgtttgaacctgggaggtggaggttgcaggaggttgcagtgagccaacatcgcaccactgcactccagcctgggcaacagagcaagactccatctaaaaaaagaagaagaagaagaaaatggagtataaagttgcctttgaacatttcttaggaaggtgccctgaggggcccaatgtactacctatcatcaagtccattgtagccagtttttcctgcagttctaagaaaatcatatttgtttttatttgagttttcagtgggacagcagttaagtcattgacttgtatttctgggctatgctataggaaagaaccaatcaggtgagaggtgagaggtctgcctgaccccgccaagggtgagatctgccatgtaacctctcctgggtcaaatacccatgaaaatattggcaaaggcacctgcactatttaacttgtctgtaattttgtgtttttggcagagtttaaattgtttaattcattaattaatttatttatttattttgagacggagcctcattctttcgcccaggctggtgtgcagtggtgcgatctcggctcactgcaacctctgcctcccgggttcaagcgattctctgcctcagcctcccgagcagctgggattacaggtgcctgccaccacacccagctaatttttgtatttttagtagagacggggtttcaccatcttggccgtgctggtctcgaactcctgacctcgtgatccacccgcctcagcccccaaaatgctgggattacaggcatgagccaccacgcccagccttgtttaatttatttaagtcagatgctccatgtaaatgatatagttactttatacttctttctttcctctttctttctttcttggagctcccaggctcaagcaatcctcccaccctggcctcccaaactgctgggattacaggcgtgagccaccgcacccagcctccttcctcttccttctagacatggttattctttgctgtaacaattattccgtaattagtcaccaatattcacatgtagttctctgtgaggagaagtgaactgccctttggacattcagtactgattctttgcaggttcatttgtaacaagctggaggggagttcggtgctgagatggattgtcacccagtggccaccttctgggacccactggccctgctctgactcaccatgctttatttcagttctcacctattaagcgcccatgagcagccaagctctgtacgtggccagggagagaaaaagcagaagccacccctaacctcatggagctttcagtctggtagcaaataaagatattaatcaaataatcacagcaccagacacataattataaatcatgttttaaaaatgcttcatgggagatgtaaaaggagccctgagaatatataacctaatctggggttccagagaaatctttcccaaggaagcggacttcgatttgagagctgaggtcgacattataccatttaggaagatggttggagctaagttttggagtgactcttgatgctaccgcaacgcacttctcagcagataccagtgatgccatacaattggagaggatgctttcataaagcgtgaggtttcctggtcacattcttggctcacagctgaattccacatgagtattatccctctcttggctattagtgctcacgtgactttgtgtaaagcacagataattggaaggcaatcattggacctctttttcatcattatcctccccatccagtttgtgtttctaagccagagttgctaaccactagtagttagcactactagtgatttgtggtttcccatctgtcctggctcatggacatgactcagataggctggaggacatgaggtgcgtggataacacacagattatctgagcattctgggatcactgagatgccctgtggttactgtggaatcgcatcccagaagctccgaccacatccatccatgcagataaacccattttccaggcactcacagcaccattgttaattttccacaaccatctgggaaaagtggtatcttcctgctccacaaaacatatggcagagccgggcgccatggctcacacctgtaaattgtagcattttgggagggcaaggtgggcagatcacttgaggtcaggagtttgaaaccagcctggccaacatggtgaaacctgtctccactgaaaatacaaaaattagccaggtgtgatgatgggcgcctgtattcccagctactcaggaggctgaggcaggagaatggcttgaacccaggagatggaggttgcactgagccaagatggtgccaccacactccagcctgggcaacagagcaagactgtgtctcaaaaaacaacaaaaacaacaacaaaacacgtggtggggagaaggggtaacaccctacacatggtagccaaagttacctgcttttaagtaataaatgtgaacacctactgctatcacatttcaaaggtacattgaacgaaagagtttgtataagaaagatgtcatctaggctgggaaagctattggtagtcttgaattaggggcagagatgctcaaagttatctttgatccccgctttccctgaatcccatagttacccccaagccacccccactctccctaccatccaggctcccaatgctggcaaatcctcctctttaaaaaaatttttttaaatttttaaataacttctctttttaaaaaaatagagatggattctctgtgttgtccaggctggcctcaaactcctagcttgaagcaatcctcctgctttggcttcccaaatccctgggatttcaggcatgagccagcacccctggcctaaatcctcttcatgtctccaaagtccttgcctttctttcctgtcctataaccacctttcctgtcctatatcctgtccttgcccttctttcctatcctatatccacttggctattagtgctcatgtgactttgtgtaaagcagagataattggaaggcaatcattggacctctttttcgtcattatcctccccatccagtttaggttctcattctttcatttggttctccttcttccattgtgggcattataaatgatgcctataatccacccacaccaacactgtacatgtttctactgatccatgtcacctgcttgaagaccctggctccttgctgggcacaggaccaagtctgtaccttgacattcaaagattttcaggctgtgcttccactttcccggaactcttcctccaccggtcctgcctctgcagcatcgtgagtctctcctggggtccaaacccaccaatccctgcctccagccttgcccaccaccctatcccttacccctccccaccatcagcctcccaaccacccttccaggctttagacccacttcatccactgacaacagagctcacatgggctgggctggtatcttcctttagttttgtctgaagatcaaactgtgggagaaatgttatgtatgaaggcctagctgtagtctcaatgcagtgccaggaaataaacttcaattcataactctgccataagggatttgttctttccatttgtcatcacggctatgatcctgagagggatcctcttatagcaaagaatggtgccagaagagaaccagggtgaattgtccggtcgacagttctaatttcttaccggcatacctttgggcttcctgagcaagcctgccctccccagcctcaagtgtgtagagtaccccctttctaagtggctgccttctaaccttccttggcctctgggacagggtgagagttgagagttgctcttactagaccaagaagaaaacatgttttagcttacagggatcctaccctcccgggcctcaaaaccactcatgctgcagaaggatccctgaacctaggttcacgaaccaaccggggtcattcaaaggcccagcccagcagcagaggcccaacttgagaggccctctttggtcatgtctcacaggttggataagaaggtgcatcacgattgtgtttcagaaacagaaaacctgtcattatatttcagagaataacagaagagctctctgacaccacaaagactagacctgcgactagctttgaagaaactacattgctgaaatctggctataccgaatagatgaaccagtgggtgatgattcacttgacctcagctgagttccctcaactattggtctcttcttggcatttgaaaaagtattcaattttcaaaaattctgtctgccaagcaaaatttttcaatcattcagaactggtccaactgcacatctcaggcctcagggattcccagtaatggagttttcagatttttttgtttccagataagtggaaattcattcatctgcatgcacagtaacaatgtactgtggacagagattgcaggggcatgaaaaataatggatagaatcaaaaaccacattttagtcagtaatttctttttttattttttttatttttatttttatgtttttttgagacaaagtcttgctctgttgcctaggctggagtgcagtgacatgatcttggctcgcggcagcctccggctcccaggttcaatcaattttcctgcctcagcctcccaagtagctgggattacaggcatgcgccaccacacccagctaattttttgtatttttagtagaggcggggtttctccacgttggccaggctggcctccaactcctgctagtcagtaatttcattgagcaaatccttacatggttctctggatgctcaaaagccatagagatgaatgttgcccccttggcctcccagcagatcccctggactgtgagtagacggaacatcacctgcccactgtccagtgagtccacatccccacaatgtatcagcccacaggcctctcagcaccttgcagtggaaacagcagagcaagtagagatttagtcacagtgacaatttactcataatagtattgcaaagcatgcctcacacctgtatctggatgtgtcttttgttttccataaataaattcttcatagacactgacacctggagaggcctcagagcatagaaacaatagcaccatagaaaacaatgtaagccacagatgtaattttaagcattctagtagccacatttaaaactttaaaaggaaaacaagtggaattaatgttaataatatattgtatttggcctaatatatcaaaatatcatcatgtcaacacatgatagatataaaaaagtattaatcagatattttacattcttttttgtaccactttttttattgacaaaaatggtatatatttattgtgtacatgttatttgaaaacatgtattattccatgtctttgaaaccctgtgtgtattttacactcagcatgtctcaattcagaccagctacattttgttgttgttgttgtttttgagacagagtctctctctgtcgcccagactggagtgtagtggaacaatctctgctcactgcaacctccgccttctgagttcaagtgattctcctgcctcagcctcctgagtagctgggattacagatgaaccgccaccatgcccagctaacttttttggatttttagtagagacagagtttcaccatgttggccaggctgctctttaattcctgacctcaagtgatcttcctgcctcagcctcctaaagttctgggattacaggtgagtgtcaccgcacccagccagaccagctacatttttaagtgctcagtatccacacgtggctggcagctgccagactggacagcaaaggtttagctggtctaaatcccttccttctacagatggggaaactgaggcccagtttaggctacagcagggatgggagtcagacctgatctgacattgctctgtggcttcctgaccccacgtaacctcctgctctggttcttctgtgactgtcttcccccttttccagctccctctcccagaaaactccatctgaagaggtcataagaatggtggtctctctctgcaggaactgttggcttctttttttttttttgagttggaatctgactctgttgcccaggctggagggctgtggtgtgaacatagcttactgcagcctggaactcctgggctcaagctatcttcccccatcagcctcccaagtagctaggactacagatgcatgccaccatgcctggcaacttttattttagtttttgtagagacagggtctcacttcgttgccccgtctggtcttgaactcttgggctcaagtgaccctcctgcttcagcctcccaaagtgctgggattattggcatgagctttggtgcccagcctgttggctatttttggatgcacacacatgcctctcaccatttgttccaaacatttccaggactcaagtcagcgcccccaaggcatgactttctaggaatgctatgagcctatcgaacagaaattccttttcatattttcaaaaagcaatggatctcatggttttataaatggtttttccagtacattgtggccattcatttctgatgctaacagcatgtgtcgttccaacacatgctcatcttcgccaggggacttctttgtttaaaaatcaggagtgaagcagattgcccaggttcccctcaatgatgtatttctccaggcttccttgtagctctaagtttcatattagaaggataccaagaaggaagatgtagttttgaaggactattgtgtcaatgtaaaattttcaaaaagttaaaatatgactcttgtacaatatagaatgaacacctgccaaagctttatctcacccatttatgaggaaaccagtaaatagtaaaactggttcaaaaaatgctttgacaaatgatgtatttgtagtcaacttagaaaggcagtctgtgataagtttgctgagttaaaatccaaactggtaacatcctacaaggcaataaaactgtaacctttggtgttctccctttttacagaacagaaatctgcaggctggtatataacctcactgtgtctgatctcttcattaataccacataagtcaaacacagatacattcctctagacaattaactaatccatagataaacttgttaaatcacgtgccagcatggcaatgaaaggacaaactcaaataaacaaaaaggccctttcatctagaagttttaaaaccctctaataaacaactctggggtgaaagcagaaatacaaactggaattacagaaaaaaatgatacaaaatgataatcaaaacactacctatcagaatcaatgttatacatttaaagcagcaatcagaggaaaattcatagcactaaacactttttatcagaaaaaacacgccccacctttttaatctatttccaagtctgagtgtttcttaataattactgctgaaatggcttattcccagccacttctattatgcctctcctttccttgttcccaaatatccccaaccaaggatttttgccttaaaaaatcaaatgtcttcaatgaggttgaagaactatgtgacagctagctctatgtttattgacttaaatactggtagaggattcctgggctctttttcatggtgtaaaatcctcacagtgacgctcttggtgttgctctaatccctaaactcagatatgtacatatatatgtccagtggtccgaggtgaattggatggagaataatttcccagcataaaatctttcaaatgtctttatggtggcatgtagaaaaccatttccacaacataatctgaagctgtactatctattgctgtgtaactaattacccaaaatcttagtgacttcaaaccgcaaacattcatacctcacattttctgtgggtcagagatctaaacgcagtttagctgagagcctcaagctcaaggtcactatgagatttgggaggagttggtggccagggtcatagtctcatctgaaggcttgactggtgaggaatccacttacaaactaacttggcaggtctcggtccattgtcaaatggttctcttcacaggggtggccttaggacatggcagatggcttcctcacatggcaaattaaacaggagagagcaagagagatggaagtcacagtctttttataacctactcttgaatggtaccccatcacttctgctatattctattcgttagaagccagtcaataagtctagcctcaggagcaattactcaaaggtgtgaatatcaggctgtggcttacactgggaacatcttagggagcgcaacatagaaaaacagctcagtcacaaactcaacaacctgcagggccaaacagaaataaaatgagtgagtgggcctggcatcagacaggtgggattggtggagactgtaacaaaactggagcatacaagtcccttctagaaggagaaactgctctctcagttccaaccaattcttgtcatgcaagaatgaatgtgggttttttggttttttccaagtgagggaggccagaaatctagattttcttgtaaaataatcccaatttaaaaactattctggctgggcatcatggctcatgcctgtaatcccagcactttgggaggctgaggctggcagatcacttgaggtcaggagttcaagaccagcctggccaacatggtgaaaccctgactctacaaaaaatacaaaaattagtcaggcgtggtggtgcatgcctatagtcccagttactcaggaggcgaggcaggagaattgcttgaacccaggaggcagaggttgcagtgagctgagattgtgccactgcactccagcctgggcaacagagtctcaaaataaaaaataaaaaaataaaaaccgtcctaaagtcaggtacagtggcccatacctgtaatcccagcactttgggaggtcgaggtgggaggatcacttgagcccaggaattagagaccaccctgggcaacacagggagaccctgtctctactacattaaaaaaaaagaaaaaacaaaaacaacaacaaaaattaggccgggtgtggtggctcacgcctgtaatcccagcactttgggagtccaaggtgggcagatgtcctgaggtcgggagtcccagaccagcctgatcaacatggataaacctcgtctctactaaaaatgcaaaatgagccaggcgtggtggcgcatgcctgtaatcccagctacttgggaggctgaggcaggagaatcgcttgaacccgggaggcggaggttgcagtgagccgagatcacaccattgcactctggcctgggcaacaagagctctgtctcaaaaaaaaaaaaaaaaaaaaaaaaaaaagaaatgtacttcttggattccactccagacccagagaatcagaaactgcaggataaggcccagctctctcctggtgattctgatgttcacccaggtgggagaaccactgctccagaccctgtatttcaatgagtgaacgggactatacaaaaagcatagaaacgtcttcattctcaacctagcttcatgtccttctctggaaaatggaatgataccaccttaccagctggattgtaactgtctgttggtcagatacagtattttgatgatttcagtcaataactctgcaagccttggtgttactactggtgtctttttctgtctgctttcccccacccccgtccccacattttatttgctttctcaaaagcatctgcacacagatacatgggtggacatcctcagaggcagggtgactcagccgaacagaaccctgcaacatgcactggcaaaagtgccccacccagcgtcgaacacccgaccttgtcatttacccacgggtgctagcacaatcagtgtgctacgattgaggggcggctcttccccctgccaactaaaccctggggaaaatgaacactcaaactccgttgttggtatacactgccattagccaaaggaacaaatgatcaaatggaaaaaacagacattttgttgtttgacatttaggtaaaatcaactattttggtgccactccctaggcacagcccagccttcttccttattcaattactttgtaatatttatgtttaatctaataaacaggtcgggtgcggtggcccacacctgtaatcccagctctttgggaggccaaggccagcagatcacttgaggttaggtgtttgagaccagcctggccaacatggtgaaaccccgtctctactacagacacaaaaattagccgggtgtggtgcaggcgcctgtaatctcagctactcaggaagctgaggcaggagaatcactcgaacccgggaggcggaggttgtgatgagccaagatggcaccactgcacttcagcctgggcgacagaacgagactctgtctcaaaaaaaaaaaaaaaaaaattgagcaaacacactgttccaggcattgttctaagcactttaaaaccattaatttatttaatcctcacaatattattatcccccttttgcagttaagaaaactgaggcatgaagaacttgccacacagtttgtgaagtatgtggtggctccgtggacactgtatataaacttgggaggaatttcatagagacaggacccagcactcattggactcctccgactctccttgagtccttgagatgctgactctgtgcctcagccagctcagaaatgagactcaggcagtctctcctcccaccacctttcatggagtgctccctgggctggatgctagtgagctgagcctctctgaactttcccactgcacctgtccctcaccgctgtcctttgctggccacccaccactacctctttccgatggccatctctgagtttcctatagcaaaaggtggggatgattcttctcaaaggccaccaggaggacatccttcctcaaagttaggtttatgagcttgtgcagacagagagaatgcccactgacagaggcataggaggttctcagtccgagggagctgggggagctcattacagggtttctgcttgcgctgggtaattctaaggaaggtggggttgcagatctagcaaataaaatatacaggacaccagtgaaacttgaattccagatatggcataagtatatcctatgcaatatttagcacatacttatactaaaaaacattattcattatttatcaaaaatttaaatttggccgggcacggtggctcacgcctgtaatcccagcactttgggaggcctaggtgggtggatcacaatgtcaggagattgagaccatcctggctaacgcggtgaaaccccgtctctactaacaacacaacaaattagccgggcatggtggcgggcccctgtagtcccagctactcgggaggctgaggcaggagaatggcatgaactcaggaggcggagcgtgccgtgagccgagattgtgccactgtactccagcctgggcaacagagcgagactctgtctcaaaaaaataaaataaataaaaataaaataaaatttaaatttaacttagcatcctgtattttcttgagtaactctacaggagggctaggatgttgtcaggaagtgagggtaatttgttgctaggggtagcttgatggtctttatctggaaggggaggaaataaagggagcttgagggatcatcggtggaggagcagccagcgctcgtgtgtgtcgaaagagggggccatttcgtcgtttttgtggtttcagcatcctggtttctgttctgtcatttcagacctgttccctagtggccttgaatagttggtgtttacattgtgtctgtgttgtttatgttctgttgggagcgtgccaggggtgtttcttcctttctcattctacttccagattctaggcttgtttcagggtctcaaagacacaggtcacttggggttctgttccgggacagctggttccaccttgaccactggttctctggaaatatttttggttgccaccactgggatggggatgctactggtctctagtaggcagacgccagagatgctgccaaacttcctccaatgaccaggacagcccccacgacaaagaattatctagccccaaattctaacaatgctgatgttgagaaatcctggtctgcactgtaaattaggaaataaaatttgtgtttcttgaggtttctccaactatctctgaatcaggctttccagaagtaaaggaaatgaaagcaagaagactgtgatcatgtatttagcacccagtgtcctgcatgctccttgaggacagagagagtgtcttactgaatttgtattacctgggctgagctcagtacctggccggtaattgcaggtgttcaataaatatgctggatgggccgggcgccatggctcatgcctgtaatcccagcactttgggaggccgaggcgggtagatcacttgaggtcaggagttcaagaccagcctggtctctactaaaaacacaaaaattagccaggtgtggtggcgcacgtctgtaatcccagctactcgggaggctgaggcaggagaattgcttgaacccagcaggtagaggttgcagtgagctgagatcatgccattgcactccagcctgggtgacagaatgagacttcgtctcaaaaaaaaaaaaatatatatatatataaaatatatatatatatttgctggatgaataaaaaaatgtgtagcacacatctgtatgcgctgcctatatatggttcatttattcagccagtattgattccacacctacaatggtgaggccagccctgggcaccgggtatgcggtgctgggggaagcaaatcagaattggagaaacttgaacttgaaggatggggatgaggggcagggctactcacattggggtagggaaagtcttcctgaaaaggtgactttaagctgaactgtgcaggagagaaagagacgaaaggaagagcattcccggataaggaagccacatgtttaaaggcctggagtgacatctgaggctctgagggagaaaaagggtggcaagtataatgaatggcaggccggaagggcaggaggggcaggatgccagtcatgccagccaggtgaacactgggattccattcttagtgctatcggaagcggtgatgggtatgaggaggggagtgccacctatgtgccaccctcataaagctcacccggcattagcactgtgtctccatccatcaaccaagaaaaccaaagtgcaattaaaatcttccctggagtcactcaaaggaggccagagccagcctccccatcagcacaacttgaaatcttgacattgagttgctgttctttctctacacttgcttcttcaggtgccaagcagctctctcaaattgaggtagccctgcccttcctccccatccttcaagttcaagcttctccagttctgatttgcttcctctatctctcccaagctcttccagcctggtggtcctctctggtttactctgtcccgttcccactttctggtctttattgtacaggtccccttgacctggctggggtctttagtatcatggttttcttctctgccccgattcagaatctgctcagcaaaagctgagccagaacagactcaaaactcacaccttccccacttggaaggtaagacagggaggaggattgcagactcctgtcatgtgcatttttcaggattgtctcatactctttgaaataactcgtctacctgacatatgtggagtggacaagagaggggcaggagagggagtgagagaacctctgaggacaaagcaaacgatgacactcaggccacatccagctggcatctgtgcttgaaagtcaagttctggctgggcgaagtggctcatacctgtaatcctaactctgtgggaggctgagatgggaggatggcttgaggccaggagttcgagaccagcctggtcaacacagtgagaccccatctctatttataaagataaataaactaagaaagtcaagttctattggagctgggcatggtagcgtgtgcctgtagtcccaggtgctcctggaggctgaggcaagaggatcacttgagcccaggagttcaaggctgcagccactgcactccagcctggacaacagagcaaaactccatctctaacaaaaaacaaataaacaaacaacaagttctattggaacccagccattcactcacgtattgtctgtaactgcttctgtaccattaactgcagagtttggttgctacagggactgtattgcccctatataataattcctaaaatattcattctctggccctctgtagagaaagtttgctgaccactgacttaggaactaactgcatcctgtcactgaattctcaaaggtagtcttgagtgtaggtagcagtatctctatttcacaaacaaacaaacaaacacatgccagggccatgaatctatataaacacccccagagagtaagtggcagagccaagattcacagcctgatctcccagggcaggttccattctctatcctgaactgcactacttgcctcatacatacaggttgtcagaaacagctggaatagtggctaggcatggtgaattacacctgtaatcccagcactttgggaggctgaagtgggaggattgcacgagtttgggagtttgagaccagcctgggcaatacagcaagaccttgtctatactaaaaataaaaaattagccaggcatggtggcatgcacctgtagccctagctaccccggaggctgagatgggaggattgcttgagcccaggaggttgaggctgtagtgagctataatcatgccactgcactccagagcctgggtgacagagtgagactctgtctcaaaaagaaaaaaatagcaggaatgaattcatcagaggtgttaaccttggatgcttacaggggccaggaagataatgtaggcgagtgaagccaacccaggccaaagttgataaatggcaactgacatttggcctcagtattagagaacaagaaccatagggagtggtggggtctgcggccatctggagaatagatatcccatctaacaaggcagcatcaccatcgtggtccagggtttctaattttcaagaagctggaaacctgaatttttttgtgtaagtctcctgacttttgcatgaaatattattatatttaaatgttgaaactagtttaactctaaaagacaagacaagcccatgtgaagcaaactgggcagagcatggatgagtgtcctataggccactggagtatgacctctgatatgtgacatacacattggagtgactgccacagccttcctcaatgtcttagactgttttctgccgctaaaacagaatacctgagcctggctaatttataaagaacagagatttatatgctacaactctggaggctgggaagtcccaaggttgaggggactgcattttgcgggggccttcttgctgcgtcattccatggtggaaggtggaagggcagcagagagtacatgtgcatgcaagggtaggagggagagagagaggaagggcaggagagagaaggaaaaggggctgaactcatccttttatcaggaacccactcctgtgataaccagcccactcccaaaataatggcgttaatccattcaagatggcagacccctttgacctatttacctcctaaaagccccacctctcaacactgttgcattgaagattaagtttccaacacatgaactttgaggacacagcccaatcatagccctggagagggttgggtcttgtggaggggagaggcagctctaggggaggcagctgggggttgccctggcctgtgtaccagacagagccctggctcccagccaaaccctcagctggacactgggtgcattctcatccttcacttatcaccagagcgaggaaggaaggaagttccacccatcaccagaagctctccacttattacttcaaggaaggaaattccaaggaaccaaagaagatacagagatgcaggaacgctgagctcaggaaggaagagggtggaggtgggtctgggaaagccccagggtctgagataaagctggtgagtttgtcctgggtatagccacagggccttgcccagagtccacacactcaccttttcaaacgtagtaaaagccaatattccctttaatgcatcaaagatatgtgtacctcacctgggtaaatactggtggaaaggccatgggtttgtaagggctgccaatccctgttgcaccattaccagctgcatgacattaagcaaactctcagagcctcagtttcctcatctgtaaggtgggattaataaatccctgtcctatggtgctaagacgatggaggaataagtgagacaatggacaatgccagccatcaagaaggcccctccttaaggggcagctgctgttggctgaagctggttaatgaagtgttatttcttcaccttcctcatgcctgtaacattgacctctgagccttcaccacagtcgagagagcttaggtccatgctccatctgtctgcagggcgatcacttccaaaccaaaaaagactcatccaagaggcattatgttgtgttatggacataggaacttcagagtttggacatcggccaggcgcggtggctcacacctacaatcccagcactttgggaggccgaggtgggcagatcatgaggtcaggagatcgagaccatcctggctaacaaggtgaaaccccgtctctactaaaaatacaaaaaattagccggacgtggtggcgggcgcctgcagtcccagctactcgggaggctgaggcaggagaatggcgtgaacctgggaggcggagcgtgcattgagctgagatcgcaccactgcactccagcctgggcgacagagcgagactccgtctcaaaaaaaaaaaaaaaagaaagaaagaaagagtttggacatcaagggggtggggagataatcctctggtaagtaaaataattctgtggaaacaatctctcattcccagcatgcaggttaatgaagattgagaaaaattcaagtaaccccaaaacatcatcatttatttactaagacttcgagtttcaaagttcaaagcttttcagaatcaaattgaagagtcagaaattactcacaggcagcagaagttggcggccctccttccattctgttcagagatttgtggtcacttgtggaatatccactatttggaaagagctgggcttaggggtgggcaatggaaaaaatacacgtggaacaccacgcctgttgttcagtttgtttgtttatctttgagatggagttttgctcctgttgcccaggctggagtgcaatggcctgatctcagctcactgcaacctctgcctcccaggttcaagtgattctcctgcctcagcctcccaagtagctgagattacagacgcccaccgccactcccagctaactttgtatttttagtagagactgggttttgccatgttggccaggctggtctcaaactcctgacgtcaggtgatccacccacctgggcctcccaaagtgctgtgattacaggtgtgagccaccgcgcccagtctgctcttcagtttttgttagtaacccactgaggcccataaaacaaacacacctgtcatcagagcagccagctttataatctcctcctccaatccccctcgttgtctcctccgtcccatcattcaccccacacatccttccctgccctacccccaaggcaagattaaatgccttcagaggttcccaaatactgaggagttttgatccgccaccacttatacataactaaaaataatttcaatttttcccaagtgacacagaagttacctatatgctgaaattgaaatcattcctttctggaactttcaacagccaagtgctgggcaagttcatccgagatgagcatttgtgtgcttgtgtgcacgtctctgtgttgagccccggcacacactctgcaccctactccccgctggcatgggatgatttgggttggagcagttgtgcccactattgtgggcatcatcatgctggtcccctttcaccatcccaccaagttatctcatcttttacagatgaggaaactgagatcctggtaggttacagtctcgccgcacaggtcccataggtagtaggagccagcagagctagtttcaggccaggtctgtgtggtttccagggctcatcagtaagctaaactggtctccttggtggccacaagacattggcttccccagaggcactcagcaggcagcctgggtgtggtgcggctactagtaaatggggaccatgatgcggccatgcctgggagcccagccagtcttgagcaggaaaaggtggggcccctgtggtagctgcacacgcttcctccagcttgcatcccaagtgtccatcaacgcagattttgaggacaaggcacagagctggctgaacttttcaaagaagagatttcccaacaggaagaatgtgcaaagtgagctctgaagatgtgctaggagaaattaaggaagtgtttccttgcaacctggtttttaatcttgtgtacattaattttttatttattttaatttttttcatactttctctcttttttttgagacaaggtctcactctgtcacccagactggagtgcagaggcacgatcttggctcactgcaacctctgcctcccgggttcaagtgattccccttgaatcctgagtagctgggactataggcatgcgccaccatgcccagctaatttttgtatttttagtggagtcagggtttcaccatgttggccaggctggtctcgaactcctcacctcaagtcgtctgttcaccttggcctcccaaagtgctgggattacaggcataagccaccatgcttggccttcatactctcttttttctttttcttttcttcttcttttttttaatcattcttgtgtatattgtttgaatttttttttctctgtgagaggaagtgaactttttttttttttttgagatggagtctcactctgtcacccagaatggagtgcagtggcgcagtctcggctcactgcagcctctgtctcctgggttcaagtaattctcctgccatagcctcccacagagctgggattacaggcgcccactaccacgcccggctaattttgtatttttaatagagacagagtttctccatgttggccaggctggtcacaaactcttgacctcaagtgatccgcctgcctcggcctcccaaagtgctgggattacaggcgtgagccacaccgcacccagccaggaagtgagtttattgatataattccaaacttccagaatagttgcaagaagagttcaaagaacgcttatatatccattaccttggttccatatgcaccagtggttaacatttcactgcccttgctctgtcattctctttctacacacacatacacacacatatgcagaattatataaatatgtaaattttttttttgagacaaagtttcactcttgttgcccagcctggagtgcagtggtgcaaactcgactcactgcaacctctgcgtcccagtttcaagcaattctcctgcctcagcctcctgagtagctgggattacaggcatgcaccaccttgcccagctaattttttaatttttttagtagagacaggatttcaccatgttggccaggctggtctcgaactcctgacctcagatgatctgcgcgccttggcctcccaaagtgctgggattacaggcgttgagccaccgcgcctggcccaaatatgtcaatattttacataaatagataattttgtctctatatagctacatatgtagtctgttttctgaaccatctgaaaatacattggagacacacctgcgaccacaccaccttatctctaaatcctccttgtgtatttctgaggaacaaggacattctcttgcacaaacagtaagtaaaagacacaagccaaaaagctattatacacacactgataacactaatataacactcctctctaacccacagctcattttcagagcttgttcattgctctggtcatgtccttatactatttcttttcctatttctttgcctcactgcatttagttgtcatgattctttggcctccaaatggtcctgtctcactcatttcattccgtgtttaactttttgcttcagtgtcacatacatgcagaaagtgctcacgtcaatatccagcttagtgaatttccacaaagtcaacatacctgttactggctttgaatggcatttgtatgtgacattttttacaaaatgaatctctttgttatcagaataggtgaatcgtgtgggtgagcccagcgtacagatgtgcagccagccatggctatgggtccacaagacaggggctgtctgtgtggttttgatggaaggatctacagggctcccttttagttcaggttttacttcctggccctgtggactcctgtggcctcttctacccatttcagagtagccatttgatgtgttttcataattgaattaagctaaacatgaaaagcagattctaaaactcagccttaactccaggactcctcaagtacacgtcaactggacccagacaagtttctcatctgagtcaaaatgctgtgacccagaacagggaaagggctttcacatagacacatttcatatgagcattgcttaaagacacaaaggaaggaagcctggggttcaactgtgctctcaccaccccagaacctgatttggtctcctgctgcaggtccatgctttttaccaggccagacccctctccaggggcatctcagccagttcacctggctccaggaggcctgttcccatcaggaaaagcccctgcatccattgctgggatggtcatttcttttttctttttctttttcttttttttttttttttttttgagatgaagtctcactcccatcgcccaggctggagtgccatgctgcgatttcggctcactgcaacttccgcctccggagttcaaacgattccactgtctcagcctcccgaatagctgggattacaggcgcctgccaccatgcccagctaatttttgtatttttagtagagacggggtttcaccatgttggccaggccagtctcaaactcctgagctcaagtgatccactcgcctcagcctcccaaagtgctgggattacaggcgtgagctaccacgaccacgccgggatggtcatttctaaccacctttttgggtgaacagcaggtttttcttctccatcctgaatgtttgatgtcactaggaaatggaagaccccggggtgtgggaaaggcacagctgaggaagctgcatgttgtccacagcatcaagaggtgccatgagcgtgcggtgcacaggctgagcctcagtccatgcgcatgggtccagagaaagtgctgcgaggtcctcttcacagttagggccctcctgggctttgcctctgattactgtcattttcttggaggagcccagaatttagaagctggagatgggttcgtatagatcattttctcaagagaaggtctccatgacatatattcataaacaaaaagaaactcttctaccttgttttctatgaagttattttctagggattctgttttgttgtcgttgttcacactgtagctctcagatcttactgttttttttttaattgtgataaagcatacataacataaaatttaccattttaagcatttttaaccatgttttttaagctcaccattttaagcactttagtgatggtgtctcactgtgttgcccaggctgttctcaaactcctaggctcaagccatcttcctgccttgacttctgaaagtgctgagattacagacatgagccaccatgcccagtcacattttaaacatttttaaatgtacaattctgtggcattaagtacattcatattgttgtgcaaccatcaccaccatccatttccagaactcctttcatcttgcagaattgaaactctatctattaaataattccccattcctccttttcctcaacccctggtaactacccttctgcttcctgtttctatgagtttgactcctctcggtacttcctacaagtggaatcatacagtgtttgtccttctgtaactggcttatttcacttagcttaatgtcctcaaagtttatcctttttgtagcatatgttataattttcttcctttttaaggctgaataatattccattgtatgagaagaccacattttgcttattcattcatccatcagcggacactgggtgcttctaccttttgactgtgggaaataatgctgctatgaatgtggattagaacctgtttttaaggaagattatttttttctcttgccccgaataaaaatattaaaacctatgtgattaagggggcccatctgcccataggcatatgcacacgtgcgttgtgatggggtgcgtgtgaagttgaatctgaattttgtgaaatgcaactaccagagtttgcggtctaggagagccaggtggctttaataacagtattatcagttcagtgatcagacgggcttactgagatgtcaagtgagttagatcaagcaaactagttgtcagggttactactgtctttaaccactcacctgatgcttgtttcttattgtctgtctcattttttcagtcacattgcaagccttttgggggatagaaataatatcttatgcttcttttggtgtctagttaggctattaccctaaaggtagcaggtcttcaataatgttgacaatggtgtgagttgacaatgactcacaccaaatttgcctgtctgcacacgctctgcattgttctgtggtgttcctgtatgactttcccagtatgtactttcccaccatcagaaggacattgcatcaaaaaaatttgcattaaacagttgctgctctcgtgtttgaagctgggcagctgaattaaattagtgaatcgatgtgttaatcaattgcaagagccaaatttaacaaatataaactcagcacccactatgtagccagctggacgagacactggatataccgacctgggaaagaattggtcttgtggttggggctctcacactccagtggaaccttgttcacagtgtggtctgcccgtcagccatggagtttgctaaaaatgcagactctcaggccctacggaatgcctctgaatcagaacctgcaccttcaccaggtccctaggtcatgcgtgtgcacattccagtttgagaaacaccagtcttgtgaatgttatcctgttagctatatcctaaatgataacaaagggtgttttgtgtgtgtcagggagagatgagactaaggtggcactgggaaactgtgcccagttctggtcactacaacctcaatgagagcagaacagcacaagagacccctctgtggccattccctaagaccttcgggatgacagcagtgcagctgggagaaaaggccctacgggtagtgaaggtatctgactgcctaagatggagcgaatcccagcagggatttcctgctctgaatttatagtaaaaagaaaaacattgtttgggttcctccagtagcagagacagaatacgaatgcaagtagtctattctgtgttgagtgatcacagaaagttcatgtgggagagtaggggagtgagacaggaaggggaggcagccaatacatggtgcaatcccactggggacctctgagagactgtgtgggggcatccaagttgttccacataagagcgaggcagctggggtgtttgtgcacccactgccatccctccttggctgagggctgccctggggtattaactccccagcactgtggtctgatctgctcagcactcactcccagccacagagcttcctcagctgtgggcagagacttccaggtgcctgcagtagagccatcacaacagaagaaaacggtgacttccaagggtcgtgggcagagcactcacagtctctgctccatgtgtcccatctggattaagaagtcaagggtgtctcagcagatgtccgcatcagagcgcaggttccaaatgaggaacaaacctttgcatttcagtaaatttcaaatcttagtgactcatcccctcagagtaactaatcatcttcacaagaccgaaaatggctgagcttcatatttgcttataatccaaattcccttttcatacccactctgctctcttccttccctaaaccaactctatgtgctcagaggacactgacaagctcaatttacagaaaattttttgtcattttctgtttcaaaatttcccttctgatattgcatgctacagattcatctcccctatccaattcctttcactgtgaacccttactccattctttcctgttttgttttttaattaaaactgaaattctggccgagcgctgtggctcacgcctgtaatcccagcactttgggaggccgaggcgagtggatcacgaggtcaagagaccgagaccatcctggccaacatggtgaagccctgaatctactaaaaatacaaaaattagctgagtatggtggcacgcgcctgtagtcccagctactcgggaggctgaggcaggagaatcgcttgaacctgagaggcggagattgcagtgagctgagatagtgccattgcactccagcctggtgacagagtgagactccatctcagaaaaaacaaacaaacaaacaaaactgaaattccaaatacagcagttactgtccccaggaacactgctttaagtttgcatttctttaagagtttgggggctgggtgtagtggctcacgcccataatcctagtactttgggaaaccaaagcgggaggattgcctgaggccaggagtttgagtccatcctggacaaactagcgagattccatctgtacaagaaataaaaatattagctgggcgtggtggcacacacctctggttccagctactcaggaggctgagttgagaggatcgctttagcctgggagctcaaggctgcactccagctccagcctgggcgacagagtgagatcctgtccaaaaaataaaaaataaagagttttgcagaccactgctccccagaaatgatcatcaacagaaagccctaaagccagtaggtttggggaaccccgcatactttattcactccctggagaccaaccctggacatcagcatctgaaaagttctgaggagtcttcagtgacctcattttatcgaatgtttaatgtgcttccactgttgttcgagcagtagtgtttgtattgaaatcgtgcctgttcacatcctacactgcttgtgttgggtggaaaccacttggggagatgctgcttgatatacagatcctggctccatctgtgcatttgaaattcataggcatctggagacagtggcatagaagcagtgggcgcaggaaaagtacaactcagagtttacaacgagaaaaagtgaaaaccacctgacacatagctaatgttttagaatgaaaagtgacttccattccaattgaagtcagcccctgctgtgtaattaagcagatatttaaaaaatttaaaaaaaaaaaaggcaggcggagtgggtaaggtacgactccaaatggcaaagccccagcttcagggagggagagggcccaggagtgaggaacataattaaatagctgtgccacggtcatccaccgaatgccttatttcctttgttttaccaagaattgcaccaaccaagtgatctgttgccagccttccatatggcaaatgtaagcacctgtccagagtactaaatggctgagcccaggagctccagaggaaacttgtctgattgctctgctgccaattccaggctctctgttaattccatccatcaaattattctttttcttctatttttcctaaaatgataatagttatttttactgtgaaatttaaaaagtgtaaagaagaaaagagacctaaattgtaccacctctaatcactccactcgggaatgaagccagtgagcatcttgacactaatgcattcagatttttgttctgtctgtgattcgactatattatgtaaatccatacataagtgcagccacaactattacttaagtgagctcagagaacacatacttttcacaacttgtttatttccacttaataacatatcactatattgatatattgacatacaatatatcgatatatactgtacatctcaagaaatatgttttaaaggcggaatcgccttttaaaggcggaatagcattccatcatattggggtacacactttatttacccagtccacagctgtttgacatttagcactttttcccctgttcactatcataaatgatattgcccaaagcattcttttacatgtatctgattatttctttgggtcaattcctagaagtagaaatgctgaatccaacagttttcatactttaatgttgatatacacattcagattgtcttctagaaagagcaagtcatcttttttctctagtgcttgtagaaaacccagtgaagacaagtggtaagaagccagaaatggtaaaagggaagtgaatgtgactgtgacacccacgccagtgcattccggaaaggcaaagtgggacagctggggggacaccaagttagagccagaagaggcactggaaacctgctcgtctattttaagcttaaggaaaccaaaggccagaaaggttaagcaacctcccaccaaggccaaggtcccatagcttagatggatagctgtaaacttcagggataattttcaaaaaacgaaaaaacgtgactctcatacaaatacattgtgtgtgtgtgtgtgtgtgtgtgtgtgtgtgtgtcaaagattgatttaactcattaatgagatcaacaggacattaaagctggctccaaatggggcaaagattgggaaagagtcagtgggcaaaagaataacaccttaaacgaactttgtcatctactatgagccacttttgcatatctacctttgaaggttagagataagcttgctattgtcagcattcaaccactttttgaccttcaaacaactcaacttcaaaaggtacaacccaatacaaacctggctaaagacataaaaggcaatacaattaaaacctctggggttctcttttctactggacaaacatcatttgcaatttacagaccttccagaagttagcatctgactttacggagtctgggccttaattaaaaaaaaaaaaaaaatcagacaaaatacaaaatgacatctgggatgacacttaggtagatgtgttacgcagagcccaagtatgcctttgcaagggaatattttgtgctttattgaagttggcatagttatatttgctgtaagaacagcctttggtggctgaactatgtgtgggagaacaaggttgatattcacggcaaatctactcaagctactctccaatggagtttctctgaaggctgggaggctggaaggccccgcagtgaattgttgctctcacttcccatggagtgggctccaggctttgtgtttccccaggaagctgaggtggagcaactgtttgccatgtgggaatctgctcttgtcagccttccagctgggggatgacagatgccgtgcgagagtcccggttatatccagagagggttttagggagagctcaggatgctggaaggcctgccggtcatctgccagtttctattttgtaaattccaggatgctggtccccacacagcatgtttgtcactaacaatgcaaccaaacaagtcactaatatttgacctatacacctgcaggccccttcaacctgagctctatgaagacataagtcagcacatttcagttataagattttcaaaatgttatccctgaaatcatttatatcctgtagtcaatggtgtataaaagtggcagggctctttttcttgatagtatataaaataagagtgtgtgttatcattaatagtatcttaaatttgtggccaggtgcagtggctcacaccataatccccgtaccttgggagatcaaggcgggcagatcacttgagctcaggagttcaagaccagcctggccaacatggtgaaaccccgtctctactataaatacaaaaattagccaggcgtggtggcatacacctgtaatcctagctacttgggaggttgaggcagaaggattgcttgaacccagaaggtggaggctgcagtgagccgagatcatgccactgcactccagcctggacaacagagctcagaaaataaaaaataaaataaataaaaatgtgaaagtgcacattatgtatttttcttccctattgtagacccaaagcctgatgcttaataagtactctataaacacatcttaaaaatattaagcaaaagatgcaagatctaactgaaaacaccaatgctaaaactaactggggctgccgaaagccttagtgaccactcttagaaagaacgtcatcccaggccgggcgcagtggctcacgcctgtaatcccagcactttgggaggccgaggcgggcagatcacaaggtcagaagatcaagaccatcctggctaacacggtgaaaccccgtctctactaaaaatacaaaaaaaattagccgggcatggtggcgggcgcctatagtcccagctacttgggaggctgaggcaggagaatggcgtgaacccgggagggggagcttgcagtgagctgagatcgcgccactgcactccagtctgggcgacagagcgagactctgtctcaaaaaaaaaaaaaaaaaaggaaaaacttcatcccttgtggtgcttcaatcatttcacttattactgaacctaaaaatgcaaagccacaggcaggagtatggtgccatctgtgactgccaaggtcattgaataatccagaggtcatggagtaatctaaggcaacactggactcagacaactgatgcaatagatcaaggcctcagcaggaggactgtttcaagatacagccacacacgctgcttccgtagttcacacattgaactgcagatactacacgcaccttttacaacttatttttctttctctgtgagcatgcgccaaattgaaggttatatcagagtgtttgctctgcagtgtaatttcaaacatagttcttttgttttcgtttttgttttctttgagacagagtctcgctgtgttgcccaggctggagcacagtggcgtgatcatggctcactggcaacctccaccccccaagttcaagcgattctcctgtctcagcccctgagtagctgggactacaggtgtgcaccatgtccagctaatttttgtatttttagtggagacggggtttcaccatgttggccaggctggtcttgaactcctgacctcaagtgatccacctgcctctgcctcccaaactgctgggattagaggcgtgagccgccatgcccagccgaaacagttttttgggttttttgtttgtttgtttgtttgtttgttttttaataaaaacaactctgggctaagcctctgggagtgccactgatcaggggtgccgcctaaacagggatgtcctcccggcccttcacagcctctcccatgtgtggtgaggagtgcctggcaaggtggagcccactttgatctcttttgtatgttgagaggagcagtttacaatttagttattaattgtttgaaagcaaacgttttacactcaatgagaacttcccccagaatcagaagagaaccgctgcctcctggatgtgcaagcacattggtgtttttgggtggtggataattgaaaactcgagcagtctctttttagtggatgccacacgtcagcaactttcccatcccatccagctgaggttataatggattggatccgagctccgcctcctctctgtcctgatttaccccctgcctggcacaaaaatgaacagagaagtcaccaagaggaaggcggagagggaagagcacttgattcactcaacaactaatgtgtgccagggactgctctgagctgaggagactgcagtgaaccaaaggacagcattcctgctccgtggaattcgcatccaggtgggggcgtttgggagcatctctggctccaggaagaacccaccgagcggcgccaagcaggaaggctgggggtgtcctaggtcgggttccccagaaacaggcccagagccgaagaactgtgtgaaagtggctatcaggaagtgctcccaagagaaacgcatggtgaagtgggggttggagcctggaggggaaagagatcagagatcagaggtccaatatcaggtgaagtcccctaagggtaaatttggatctgtcggttgtttgtttgtttgtttgtttgtttgttgtttgtgacagggtctctctctgtcacccaggctggagtgcagcggcacaatctcagctcactgcaacctctgcctcctgggttcaagcgattctgctgcctcagcctccagaacagctgagattacaggcgcatgccaccatgcccagctaatctttgtatttttagtagagatggtgtttcaccatattggccaggctagtcttgaactcctgacctcaagtgatctattcgcctcggcctcccaaactgctaggattacaggcgtgagccactgctccccgcctgggtccgtcttaaagggagcttgaggacaatgtaggtctcacctcaattatcccaatcaggagtggggagctaggatatttacaccccaacacccagcttcactggtcaaggactgaccctggagacccttcatggtctctgcaccaaacaaagccagctgtgccagcctgaaccaccagctttgggggatgcgcttctcttgtcctgaccactctttctctggaggtgtgagaggccccctctggcagaagtgctggtctcaattgaggccactgtgcagcctgatgtttctagggattttcagatctgaaaaaagcccaagataaaaaggtccaagatctgaaaaaggtccaagataaaaaaggtccatagctttccaaagctatggaaacctcgtcatcaatgccttgaggtcccccgaggaggtagcaccactcagtaggagtaccacgtgctccattttctgaggctctcctaatttcaaatattctgtccactgtaagtccatccatgcttctcagaccccatgtccctgtggaatgaaagtgcccatggggaccataaggtggggagcttccctcctgctcccaggaagcgcccaaagaccagtgtccccagcagatacaattagccaatgcattctgccacctggaccccaccccatactgcagcattcgtttaaaccatacctttcactcgcctgtctttggaagagggtgtaagtcactcagccctccccccaccagcacactacagatgctcgcctgctgggggctctgccagcataacttccgtgaactctcggcaaccttggacgcagccttcatcctgtcctccttttaagcttgaggaaatttaaggggtcagattatttactcaaggacacactgcttagagcagcagagatgataacattccaagtaggcatttcagtcaaaattctgcttttaaatactaagttggccaagaggccagcgcggtagctcacgcctgtaatcgcagcactttgggaggctgaggcgggtggatcacaaggtcaggagttcgagaccagcctggccagtatgttgaaaccccatctctactaaaaatacaaaaattagccaggtgtggtggcgggcgcctgtagtctcagctacttgggagactgaggcaggagaatcccttgaacccaggaggcagaggttgcagtgagccgagattgtgccactgtactccagcctgggagatggagcgagactgtgtctcaaaataaaataaataaaataaaataaaataaaataaaataaaataaaataaaataaataaaataaaataaaataaatattggctgagaggtgtggttcacacctgtaatcccagcactttgggaggccaaggtgggaggattacttgagcccaggagtttgagaccagcttgggcaacacagcaagactccatctctatttttaaaaatagacaaatattaaattatccattgtgtttatttcctttagatactaccatttactaattagaactaaaattataaagttattcacaacaaaatactcatttcacttaactcagaggatgggggtggatggcttattacctttttttctacatactgttatttgaggtataaggagaaaaagggaattaaaagatagtgaatgttgctttttggtaaatagaacatcccgattttgactaaggtggtgtcttgaaccaacagggctaggatagacaattgaataaatgctgttgagctcatttgctgtccatttgcaatgaaaaatgaagggcagagttctgtttcaaacctccacctcttcatacccccacctttatacccccaccttcgtatccccaccttccatacccccaccttccttacccccaccttccataccccactttcatacccccaccttcatacccccactttccatacccctaccttcattccccaccttttcatacccccaccttcataccctacctctttatacccccaccttcatacccacaccttcataccccaccttcatacccccaactttcatacccccaccttccataccccaccttcaaacccccacttttgtacccccaccttcatatccccacctttcataccccacctccatactccaccttcatacccccaccttcataccgcacctcttcataccccacctcttcatacccccaccttcataccctcaccttcgtaccccacctcttcataccccacctcttcataaccctactttcatacccccaccttcataccctcaccttcataccctcaccttcatacccccaccttcataccccaccttcatacccccaccttcacactcccaccttcgttcccgacctcttcataccccctcttcataccccaccttcatacccccaccttcattccccaccccttcataccccaccccttcataatccacctcttcataccccccaccttcgtacccccaccttccataccccaccttccttacccccactttcatacccccacctcttcgtttcatatccccacctcttttttttttttttttttttttttttttttttttttttttgagacggagttttgctcttgttgcccaggctgtagtgcagtggtgcaatctcggctcacagcaacctctgcctcctgggttaaagagatgctcctgcctcagccttccaagtagctgggattacaggcatatgccaccatgcccagctaattttgtatttttagtagagatagggtttctccaagttggtcaggctggtctcaaactcccgacctcaggtgatccacccgcctcggcctcccaaagtgctgggattacaggcatgagccactgcgcccggcctcccccacctctttgtgctcctcctctcaccactcctcagcctttgggtaaatttgtggaaaaaaaaaaaaaaaagctgtcctctgggcacattccttagcctgcagaaggtgcctcaggcagacagagccaacccagggtatagtgcttaacaggctgggggaacccagctctggccatgttgtagttgttccttgctctctagtcctgactttgcaccatgcacaaaactaaattccagatgaatgaaaggactacaaataaataaatacatcatatataaacaggcaaagctgtatatactgtataagtcttagcagaaaataaaggagactttattacttcaagatgaggaacttctttctaggcaagggccaataagcaatggccatattgaaaacttggataaatttgattctatcatcattaaaagcttaagaaaatttaaaaggcagaaaaacaatgaaagagatcatatgtgaaacatatcagacaatggattcatatacacaaccaacttatgcaacttaattttaaaaaatcaagaaaccacaaaataggcaacagatgaatgaaaaggcaattccttgcaagaggaaatagaaataaacgataaaaatataatcagggcaaagcaaatgaaaacaaaaattatttctgctcatcagattggtctgcttaaatgtttgataatatcaatcattgacaagcagcgtggacactttcacagatggcaggggcagtgcagaagggcacagccacccggggagcaatgtggcaccagctcagaacctgctacatgcataggctccagcattttctctgaggtttcacacagtgcacaagggaacacacacacaggtgaccatcacagccctgcctgtgatagcaaaactctggaaacaactaagcctctatcaaaatagaatggatatgtggattgtggtatatccctatggtggaaaaccgttcccacttacaacaaatgaaccagggcttcgtgtatcagtgtggataaacctcattacaatttgtcgagtgaaattagtaagccagtacaattcctttggttggagaaaacacagatgataccattcaaggatgatacacacaaaactgataacagtggttacatctgagtaggtgaaggagattatgggtgatggtcaagggagattacttttaagtacaatcatttattttctttaattaaaatatattcatttgtgacatttgtaattacaattaaatatcaaaaatataaatgcaaacacccttgggaggagtaatacacaaagttaaaagaaaagaagcaatgttctccaaaggtgtgcttgcatcattgtccaggtgcccctctgcaagtgaaggggaaaagcctccattacgtttttgttttccaggtgacagttcctgggggcaaaggtcatttgaaagtttggaggaagctcattattttccagactagtttagaaaaaccccaacatgagaggtacccaccacaccaggaggctcctcagccaagcagaagcacatggtcgagggaactgtttgggtaatgcggtttttttaggatctggaggtagatctgataccgcagagctgattcccggattataaatgcttaccacacctcaaggccaagttgatgcacttggggaatggaaattccatagctgggagccaaggacttgacttttcccacaccctaagtttcaagtcttcaacatatcagcaacacatcccttttcaaaccactgataacattcctgaatgagacttggaatttgaagagcgctgtatcaggacttgtgctataagcactttcttatttgacttttacttgaccttcaagagaatttttctccttttatctaaccctaaaagaaagaaaacaagacttggggttcctcccttttccctcctccctgcagcttcctatgcatgcaaagaagcatacaacaacttttctctctattaggggaaattcagcgcctagtgggcaaatctctaggttagaggcttctgagcagacaggcaggaggagattggactccgcggacattgtttctttgtagtcccaggtctctgctgctggtgattaaatggcctctttccaggaggggaggtacatgaatccattttaagtgtcttttagtatcagctctctggttaataacaattgccattaatataaagagataatttgttacttatttattttaagagatggggtctcactctgttacctaggctggagtgcagtggcaccgtcatggctcactgcagccttgaactcctgggctcaagtgagccaccttcctcagcctcctgagtagctgggactacaaggcacatgccaccatgcctgggtaattttttttttctttttggagatggagtctcactctgttgcccaggctagagtgcagtggcgtgatcttggctcactgcaacctctgtctcccaggttcaagtaattctcttgcctcagcctcctgagtagctgggactacaggtgcatgccgccatgcccaactaattttttgtattttagtagagacggggttccactgtgttgcccaggctggtctgaaactcctgagttcaggcaatctgcccaccttggcctccaaaagtgctaagattacaagcgtgagccaccacgcccagccaattttttacttttttgtagagccaaggtctctctatgttgcttaggctggtctcaaactcctgggctcaagtgatcctcctgcctcagactcccacagcactgggattataggggtaggctactgctcccggccaagagatcatttaaataggaagaggattagagagtatttaggtgcctattgaagtgttttgttttgtttttgagatggagtctcactctgtagcccaggctggagtgcagtggtgtgacctcggctcactgcaacctccaccacctgggttcaagtgattctcctgcctccgccttcggagtagctgggactataggtgcacaccaccatgcccggctaatttttgtatttttagtagagacagggtttcaccatgttggccaggctggtttcgaactcctgacttcaggtcatctgcccacctcagcctcccaaaatgttgggattacaggcgtgagccactgtgcccgacctgttgcagtgttttaatctcattgtcctttttattcctccaatgaccttcccttgacatcatcagccctagctttggggatttaaggatgagggcacccaaatgggtcgcccaaggcgacccagccaaccggggcccgagacaggatttgaagacagatttttctgagccaaaagctggtatgcctacccctactcccagctgtcaggtcaccagtcagagcttcaggccacaccgcctcgaaattgcacaagttgctgcctgaagaatggccccttggatgaggtccccgcctactgagaaattatgcagaatgattacaaaatggtacaaattactgtagactcctgcaccagattggaactcagcaggcccagccttgcccaggcccagccctgggtgtgacctcaaagggctgggaaagaacttgggccttctccagttattctcttgcccttggccaggatgccagctcttatgcaggagcactcaggtgaacacctcaggcttctcaaggtgtgttatgcacgaatgcaggacgagggagtggacccaacccctgacctgccttcctctccctcttgtggtcaccagcaccccctcttcttccctggaagtccccagccaggccagcagcccactctctcccagcttctaaaggcaacacatcacccctctgtcctgctgtacatgcctgcagggaaaaacaaacacaggcaatgccccggcaagacctccgttgaggtctgctgtgctgtataaggataggtggctatcccttgggttggggtctttgtcactgcttgtgggattttctgggaatgatgcagctgtgctgggtgtttgatgtaagaaccatggtctcaccaactttgtgccttgtcagccttgtcctatctgaccctctggctgcactgaatcacaggtggctctgccaccactttcccaggtgtccacagacgagcaggggtgtagtgagcagcactcactcaccagctttgcagatgtttagacagcccctccccatgcttgcaggaattctgcacaggtacagggatgtgttagaggctgggattgtgtaagtgggtctggagaaacttcagttagtagcaccagttttttgtgtttttgtttttgggttttgtttgtttgtttgtttgtttgttttggtctggtttgagacagagtctcgctctgtcacccaggctggagtgcagtggctcaatctgggctcactgcaacctctgcctcccgggttcaagcgattctcctccctcagcctcccaagtagctggaattataggcacatgccaccatacccagcgaatttttgcatttttagtagagatgggattttatcatgttggcgaggctggtttcaaactcctgacctcaagtgaaccgcccacctcagcctccggaagtgctgggattacaggcatgagccaccacactgggcctgtagcaccaactgctattggctttgtcatgggaaagctgacattaaaactggcctcctttgttgggtgacaagttatttctgccctcaaagaaggaaattttgaagaagcaagtgtaagggatgagattgaaagtctgtgagaattagaaacaaacaaataaatcaacacaaacttgtccaaaaacaacttcaaaaaaacacccaaaatcccttcagtgggacaaaatccaaccgtcagaggggaggaagtgttttgtgatgctaactgctgctggcggagggcccagtgggtatatacacatgattctgagaggcaggactggccctggaacactaaactctggtccatttgtgagattaaatccctctgcactctgggacaagtgagtcaggactgaatggaaggggagggaaaagttgctgggggctggggctgggggggatgcgagggaccaaaaaaaagtccccacatccagcagggaagggtccacagcgatccagccaagtgcaacctctgtgcttgtccaccctcgtgccttggggtcatggtgccttcctctgcactagagataggtggcatggcaatggtgccttcctctgcactagagataggtggcatggcatgattggtgacttggcatgggagtgccgctaagtgacagccacagacaccgtcagcttcttgtgtgtggccagatgtagagaaggaattgaggaggaaacttggaggtctggagatccagccaacagcatcggcaagagcggtacccagacaaaaacagcctggctgaagggaatcaactgatgcccattctgatgagaatcaaggccatttggggtttttatgttcaaatcagtatgatggttgtgaaggtaaccaaagtgtggagagggaaatgtacccagtgacggggcttcctgctggggtgggagtcctctctttgaggtttgccagaggctgtggccggccctccctcacaaggccttctgcttctgataggtgtgtggctctcctgtttggggccacagccacggtccagaatgaagcagggcctagtcccagggtggtggggcttcagcagacgtacccaaactcccctcaaccccttccttgcttctacctttttagtcccttcactccttccattttcatacacaccaccctttctttttcttgttttcctaaaattttgtttacaaagtactttaagcatacagaaaaccacacaccatattaaaatacccatcactcagcactgtcaaatgtcatcatttcgccatttcattttaagaaataaaatctttccaggcacggtggtgcctatctgcaatcccagagctttgggagaccaaggtgggaggattgcttgaggccaggagttcaagaccagcctgcacaacatggtgagaaagtgtctctacaaaataaatacataaataaaatctcacacgtgaccgagcccattgacctgtgaacactttcatccatttctcctgtctagaggtaaccactatcctggattaggattataaccccatacatattaggatagcctttgtgtctatgtgtgtatctataaacatacagtacagttttgcatgcatttataattttaataatataacatgtaacagtattttatttttaaaaaaactttttatagagacgatctcactatgttgtccaggctggtctccaactcctggcctcaagcagttctcccaccttggcctcccaaaatgctgagattacaggcatgagctaccacatctggcctaataatatattttaaaacctaacatagacgaaatagtattctttcaacatgttatcaatataaacattatatggatacattttatttgttaatttgttatgtcatagttgtacatattttggggtgtacaggtgatattttaatatgcaatatgtaatgagcaaatcagggtaactgggatatccatccatgtatctttttccttgtgttgggaacgtttgcatggttttaaacttcacatgctgtatataatgcttctcgatttgccttttttttttttttttctgctttcaaaaaaagccttttgggcttttatgtttatacatgtgttcatacatacagttctggttcattaatttttaactgctatgtagcattttatactcaattaatgtatccattctcctcttaatgaacccttaggtgttctcacaaataatggtgcaacaaatattcttgcaaaggtatctttgggcccacgtgcaagtttagtctctaaagtacacatataggtttgtgtatctttaaccctacaagatgttgccaaattgctttccaaagtagctctgggggtaatattcctccagcagtgtaagaggtgccatggtttgaatgtcacctctaaaactcatgttgaaatttaattgccattgtaacggtcttaaaaggtgagacctttaacagatcattaggtcatgagggctctgccctcacaaatgaattaatgccgttatcttggtagcgggttagttttcaaagacgtggtttcctgacaaaaagaatgagcttggccgatttcctctccctgtctccactcacttctgccttccgccacgggatgactcttaccagatgccagagtcatgctctcggactttccagcttccagaaccatgagccaaataaacttctgttcttaataaattagccagtctgtagtattctgttatagcaacaggaaacagagaaagacaagggggatcctgttttcccacatcctagagtatttggcattgtcagactttttaaaaaaactttgccacagagatatgtataaaataggatctcctaatcatttcctctctcgaggccccagtgcttctggaagctccccctctggtccttactgcagtcacaggcaccgaggggatggatcaagcatgaagggcttggctggcttcccttcttctgacctctaagtcctgggagtgtccagagctatctgctgggcccccttctccatcgacctctctccttagataatctctccctgccacagtgctttagaatgccagccacacatgccagtgacttccaaacagaaaaatctccatccagagtgtcagaagctacttcacagatttatttgatggctgataaacaactgaaataaatttaatctgcccgaagttcaatgcagtttccccctcaagtctaattcttccccattgctcccatctcagtcaagggcaatgccatttattaattgctcaaaccaaacacttcggagccatccttgattattctctttctaccacccccacattcaatccatcaaattatatcaatttctatgtcaaattgttcctaaattcccccgttctttctagttccaccactaccacctcggtccaagctgcatcatctcttgcctagaccactgtagttgctcctaactggtcttcctgtttctcatcttgccctttccaaccacctcagtgccaaggtgatcggtttagaccataaaacagatgtaaaatggctttctcctacttaaggccttccaatggttcttatcatggaagactcaaggtggtgaataccatgatctacaaagttggcaagatctgatccctgcctgcctctcctcctgcacaccttcctggcctccagaactttctctccatgtggagggctcttcctttgatcttttcatggcattcttgtcattcaaggctctatcgcttaaaaaagacttgccctgaccaacccgccctgatctgtttggcccctttgttgctcccacagcattaccttcacctgtcttcattctggaactgctcagtgcttggttctggtgtctttctgccccaccagaatctcatctccatgagaactgagatcttctcagctccactccccatttgcagtacctggcatgaagcgggagcccataaaagtttgtcgaaatagtgagtgaatagatggggtcacattttagaacaagctttaagcgcaagtgaagtttccctcccagagtctgggtgggataaaagctacttgagacaagacaacatttctctttagtgagaacagtgctcaaatttcttagcctcaggaccccttgatgctctttaaaattattattgttgttgttatttttttgagatggagcctcactctgtcgcccaggctggagtgcagtggcatgatcctggctcactgcaacctccatctcctgggttcaagtgattctcctacctcagcctctggagtagctgggactacaggcacgcaccaccacgcctggctaatttttttgtatttatgtacagatggggttttaccatgttggccaggctggtcttgaactcctgacctcaagtgatctgcctgcctcggcctcccaaagtgctgggattacaggcaagagccgctatgcctggccaatgctcttaaaaattattgaggatcccaaagaacttatgtttgtatggatcatatctataaatagttgccatcttagaaattaaaatgaaggaatttaataacgcttattttaaaacaataatggacctgttacctgttaatgtaaataacgtttgtatggaaaattactatgtttcaaaaaatagtgagcagagtggcacccttgagaacagccactgtacacttacagtgcctagtacgcgccaggaaagactctgttgaatgagtgaataggagggtgaaagattttagaccagcctgaagggtcagatgcaggtgcatggataggtggggatctgagatggggccgccttttcccctagatggccctggggcccactcccctcctccccactcatccaccccagcctcactcagtcctttctcttccctttccccaacaatcttctctccacagcagtgcaaagaatagaacaagaaatcattttgatgtcgtcagaaatcaatatgtaagctggatatatcttttaaataaactcatttctataacaaaataatcattgtatgaatttcagtccttcaaagggggttcctttggagggtttcccttgccaaatgaatattgaggcccggttttgccaggatgtatttattcccgtctatattcatgttgagaaagctaactgggtgttatattatcttccttattacaatactgaaacctaacaaactgggtgtcatattcttttccttattacaataccgaaacctaagttcttcccctttctaaggagaagctgcctcctccccctttattttttcctctggctagaggaaattcacagagccaagattaaaaaaaaaaaaaaagaaatagaaaaagatggtcatctctgttcctattgaaaagcctgagttccccgggcgctgtgggcatgccacgcctctccacttcctgacgtcatactatttttgtctttgaatagctcattgacacaattgcctcggagatcggagaactgaaacaggagatggtgcggacagatgtcaacctggaaaatggcctggaacccgctgaaacccacaggtgaccagagacacggttaggtgatgggtgcgagaaagggatcgagtgaaccctggcactgccaagggctgacttgcagtcactcctcagaagtctgggagctgggagtgtggtagcagctctagatgaaatcctctgtaggaggtgggagtggcctaggaactagttgtctgcttgtttattttaatcactttgaaggcacttgaactttatactctctcaattcctcctggcaccagaacccggaaacctaaaattgtctgtgccatatccacctactcccaatgatggaaacagtaatgcagcaagatccagcgtgtgcaaagtagaattcagtgtagccgtgtgagtctccagaaggcttacaggggagcagctaaagaggatggactcattttgcattctcaggtcagagaaaaaccccagcagtctccaaaaaaccattaacctgaaaagccgtgcagtgattggaaactggatgtggttgtaaattcgatacaaagggaagacggcgtgctgtgctgttgaaggcgatacctgtgcacatactgcacaccgtctgaataggaggcaagggactggtctgtacctggagaaagggggtgcaaaggtcggggggtggtgggaagttgaaggtgacttcttccaactttgatgctaacaagataacaatataatggctataaaaagacacagacacttcgtgccttagaggccagatttgttaacagcttcccctttctcccagaaagtggggctgagcctgcctggagcagtgtgaggctgagatttatggagtaggttttgcctgcaagtcatgcaacaggcaggccagccagatggttctggttgtccaggcaagtttcaaaccagcccgactagttccgccatacgctgacgggagagagcaacatcccagggaggcacttgcagctggaaggtggtactttgatacccgatgtctctgggggaacagcactcacccttaattctctgtgccttcctttcctttccttctctacaaaacgatgggggtgaaccagatggtccccctgctccttgcagcacacccagcattctatgattgttcttgacctcagtgtgaaagtcttattttttccccataaactagacaaatgcacaatgattttcaggtagtgactctctgcctcacctccagagtagtttcaaacatcgtggaactttagccagggaatttctctttatcctgtgccttgttgagctaaaatttaattgggagtctaggctgataacaacagaaaagagagctttggtagcactgatttctttcatagccaggaaaggcggctctgtgagatcaaccccaagctccacagatgacagacacccagacacagagcggcggaaacctttcccctgcatataagcacaggggattttgggggtgtgagaaggacgttctgaacatgtgaggggccctcaagatcttgttttctgactccggtgggtattagagtgagagctgggtggttgcttaatctttaacatttccttccatcttttccttttcagaggtaagaataactgtaagcagtccacaacagccttttttcccagatgaatgtcactttgaatgctatgttgcttaattcatgaatttatacatttgcaaaggcattttatttggcttttttttaacagaaaagaaagaggaaaaagcaagatgagttgtctttatttaacaatatagatcatgttggccatgtggcaacactgttcatattaaactactgttctaagtcgcttatagcgactaacttacggaatcttcctagcacttccaggagggaaagctctttagggcctgcatttgactgatgtggaaactgtgtgctgtggggaaaaagctacacagttttggcttctgtgctggagtgtcttgctgattttttagaagtagtgagtttggttttaatttctccattttgtccaatggagctgtcaggagggccagttcagttatttctaagatcaaggaaaagcatagctgtggccacaattcagcctggcacagagcagcagccaaaggggagaggagggaagaggaaagcagaccagtaggtagcagagttgctttcagcaaaacccctggagaaagaagtggcgagcaccgcccgggcccctggctctgcacgtctgacggctgcaggaaatgcaccgccgtcagcttcctctgcagcttcgtactctgtgagtgtgagctgggatagggagtcgcctatcccaccacagccaccacgaaatgtctatggttccttagttgatggaataccagattaagcaccaagctagtccctaggttaggaatcactattactctagctgtgttagtgtttggttgctctttcgtgcttaatattgagataaccttgatctttaactttgtcttgtgccatggactccttctctgaataatcttttgaatgcataaaataacatatataggatgtcatgggaaaaacaattacagtgaagtccagtgatcagaatgtttcagtgtgtgtttcagcatgtgcttccatggcataggtgcttctgttttacatgtgacagataggcataaatgacacaatctctgtaacagctgtgacaacggtgaaacctctgtggtttctgttggtgacaaaatcacaggtcgtgatactactactgtggtttgttgcctacaatcaaaatggaaggaagttcattcagaatgaggctatggaaagtgaagatgtcagtttttggcccgatggccagtgcccacctcccgtcctgtctcctgtcagcgtcgtctgccatggtccatctgccctcctttttgggacatttgcttggcttggcttctgggaccccacacctccctgggatcctcttagctgtcctgctgctgcccccagtgccctggctggttcttctttatctccctgaactccagccctggagaacccagagatcacactttgatcccctccttttctttttttgtttgtttggtttttgtttgtttgttttgagacagagtctcactctgttacccaggctggagtgcagtggcacaatcacagctcactgcagccttgacctcctgggctcaagtgatcttcccgcctcagcctcccaagtagttggaagcacgggtgcccaccaccacacccagctaatttttttttttaatttttggtagagattggggtctctctgtgttgcccaggtgtgtctcagacccctaggctcaagggatcctcccacctcagcctcccaaattgctgggattacaagtgtgagccactgcgcctggctgagccactccttttcactcttcacacctttccttttctctctcccactaactttgtacaaggtactttaaaaaatatctgtgcctcagtgttctcctcattaaaatgggaataataacagagttacctcacagtgttgttgggaagattaagtgagttaatagctgtcaaggactcagcacagtgcctgacacgtggtaatagccacactatatgtagttttaaaaggtggtctgtggagtaatttcctaggttatcccacccagtcttgtggctctgataccatctatacattggttattcccaacttatactcccttggccaatcctctctttgagtccagaggttggtaaccaactgcccactcaggaagtgttccttcataggttcattccttcctgggtcttccccgtcccagtcaccatgcctccagcttcttgggccttgtactcatcaatggtgcctctattcctgtcataactgccctcctcccatccatctccaaatccaggcagctctaccttttatttttctttgagacagaatctcgctctgttgcctagagctggagtgcagtggtgacacgatctcagcctcctgcaacctctgcctcccaggttcaagcaattctcgtgcctcagcctcccaacatagctgggattacaggcatgtgccaaaatgcctggctaatttttgtaattttagtagagatggggtttcaccatgttggccagtctgatctcgaattcctggcctcaagtggtccacctgtctcagcctcccaaagtgctgggattacaggcatgagccaccgtgcttggcctctacctttaaatagatccaggatggaaccacttctcaccagcaccactgcagtagcccctgcctggtgcctctgcttctaccagttccactttctccaggctattagccaagcagcatggtgaaccttttagttcacctaagtccaagacacatctctcctttgttcaaagccttttgataattttgcatctaaaaccaaaattattaccatggccttcaagactctataagatgtgacaccccagcacccctctcctctgccatctcttctctagcattctctccccatcactcagctccagtcccactgacttccttgccaatgtggcccctgcctcctggcctttgtacttgcggttccttctgtctggcacatccttcccccaggaagccttcacccttgagccctccttttcttctacctcattacctggctttatgtttcttcatagaacttgtacacacaggacatatattcacttgcttcctgtccattctttcttttttttttttttcttggaaacagacttccactctatcgcctaggctggagtgcaatagtggtgtgatattggctcactgcaacctccacctcataggttcaagcaattcttatgcctccagcctcctgagtagctgggattacaggcacgcgccaccaccaccggctaagtttttgtattttagtggagacatttcatcatgttgcccaggctggtctttaactcctgagttcaggcaatccgcccgccttgacctcccaaagagttaggatcacaagcgtgtgccaccacacctggcctatctgtgcatttcctgcctcccaccactagaaggtaagctctgtgagaccagggactgggtctgtccttcaccctgggattgcagtgccagggacagtatctggcatagagcacgcactcgcaagtatttgttgaatggataaaggaaaggtgccaagccccttagtgattttaaagtattcttgcctcagagacctcttgcaggtggccaccaaccggtgcataaaaaaataaaaagttgaaaatgtgtgacaggcctaaggcttcctccctagcaaagaaatagggcagaggcccttcccccagtctccagttgtgcctccctgaccagttctaccatgagctattttaatctttggccaatagagtaggagctgattaaatctccctccatgcctctgctgatctaccaaatggaagcccgtaagccaggggcgagactgagggcttcttgctcctggttttctgctctctcccagtgtggtttcctgcttcctctcttcccactgcatccctgcaaagactggagagtatgggaacatgaaggcatttcactcccctctccctcccacatgattccacagtccattttcatttggcggaagcaggcctcttttgggtaggctcaccaggcctgaggtaggttccaccctcatcatcacttgaacccatcccctctaggctgagacaagtctctaaagatcactttatcctcaggcggaacagagggatccacagaacaacctccccagctattgtctgggcccaggctgcctctgcaggatccctggcatcctggctagagcaggtcagtgagaactgcagctcatcccttcctccactctcctgtagctgtcactcctgctgccacttcgctggtgtcctctagcccaagtggattgctgtgagatgcctgcggtcccatgtcttcactcctcctgccccaccacagaaccagacatgacacaggaaattcaaaaattccttggccagctcttctcaatgttacaatgtagcagctggtcatcacctttggcctcttctgggaagctctgagcttcccagtggctatgtgacagcattgacattataaccacaggaaacccagaaggctcctcccttgtacaattgttcacttcttcacttgcccagaggtgagaactgaagatgagaagggaagaatggtggccgcagcctggggaaagatgcccagagttccacttccttaagtctcaagagggacagttgtgaccacattagcgactctgtggctttttgaaccagatccaccttcacttggtgctgctttttaaataattttccactgaagtaaaacataactcagcaaaattgcacaaataagtatccagctagatgaaaatccacagagtaaacacatcacacatcgatggctttgctcacaaacctgttactgctacagggcaggccgtgtagcagcaacaggtttatggtgagacattttccggctatgtcactgaggattctctactatgattactttgatcaatttacccccaatcccctagaatatttccatatttcaactcaaccaggagtgtcctgaacatgatttcaatgaattctatgagggttgaccaactcttcgctacactatcaccaatgtagcaacaactaaactcaaattaaagaaaatatttaagccgggcagggtgactcacacctgtaatcccagcactttgggaggctgaggtgggtggatcacgaggtcaggagtttgagaccagcttggccaacatggtgaaaccccctctctagtaaaaacacaaaaattagccaggcgcagtggctcatgcctgtaatcccagctactcaggatgaggcaagagaattgcttgaacctgaaagatggaggttgtcatgagccgagatcaagccactgcactccagcatgggtgacagagtgagactctatctcaaaaaaaaaaaaagaaagagaaagtatttattcagtggatcatatttaccaaaataccatgagagtggagcctgaagatttacacaacctaaggagggaaaaaattgtaaacaagtgagtatcatgtaacgaaatgggacataatagaatacgtcagatgaacagaggaggacagcagatgtcccaagaacctcaggtgggaagcaggtaattctaggtcagaggtacatcaatttcattaacgaataagaagtgtaagataaaaaatgccctaaagagctgttcagtctatcttgactggtgatatctgttatctttgggaagttttttaaaagaaacatttaagatttctttttttgatagccaaaagtaaaacgtgtacatggtggaaaaagcacaatgcagaaaataaaaataaacaacaccctgaccccgaccccacccccactccaagatagaatcatttttgattgtttgttgggttggctgatttaattctttgctttgatgtgtatccttctgatgtttttgcatgacaatccatttaaatggtagatcatgcatgatttttcactgacctacaaggtgtttttgatcatcctagaaatgcagtttcctagaaattgattctgtttttgttgacgggtagcaccttccaatgtagtggctagcttatctgtttacagtaaaccttggccacacaatgtcaccagcagcatactccagagttggagctattttgaccttggccacacaatgtcaccagcagcatactccagaattggagctattttgtgctctgtaggctttgcattgctgctatattggcaattggttctgccataaaatatctgcttagttagaattcatctgctaggaaataacaccagtgtaacccagagcaattaaatactagaaactgccaatccatggaacacttgcctttccgtgaagcagggtgcatgccccgggcttgaagggcatcgggaccaagactggagcccgcctggctccttcttctgcctgttttcagctccaagggcaaccaggacaacaggttctttgttcctctttcttatttttacaggaacaaatgaaagcctctgccagcattcgctctgtatctggccttctcatctctagctggagagtcaaccagaggaagttcctgggcaaaacagctaccactttttcttacctcccgaaatggcagcgtctccctggaggcagacatgagcttttgttcccatttctgtgtcctcttctgctgggcctcagttgatagaacttaaaaattaccaaaggccctaaaggtttttcagaatagtcctactgtgacatgctcttacaaatcttttttgaggaagttggggctccaccctcaaaaagcagcagcccttcgccatggaggaataaaatctgtaaccccaaatatgctagtgattctttttccttttagagtttaatgggacaaaaaaaggccttgaggaattaagtatgaacttgcttgctctagggaaactccctaagtcggaaaactggacctaggaccagttttatcaatttctagcattttgatctcaaataaggagataaactggatggcctctgatagcccttaaaacttggctaaatatgcaggggtccttctaagacaatccatttccccatgcctctctgcccaccactcttcccatgctgggtggtgggtaaaaggtttcttctgctcacctggcaatttccatgctgtcaactgtgttagccaggccagggtcctgccgtgtccagaataatggattggggtttcccttcttctccagactaatagaatattacagagacatgtttaattccatttcaatatcctttttttttttttttttttttttttttacctataactagactcaagttctgaacttcaaaattctaaagaaatatttttatgtctgaaggtgttaagaaatcattggatatcaacttctatgtatttttgaagttgaagtttttctgggaattttttgtttgctctgtgtgtgtgtatgtctttaacacaaattggaatttgtcctgtgccaaagatttttagttgatagatatcttcagtatgggccattattttctgtctctctacataaggggcctctggtactaatattcttccacaagttgttgatcccagacccaccacctctcttctcccaaccccgctaagtcctggcttcatctcccacctatccaggcatcttggctgcagcttggcatttgaggtgtatatttgtgttccttttgatacatggtcaaggatctactgccccaagatcaggaccatggtgggcacaagactcttgacttctgtctcatccttgattcataagatgacccctgcattggcctcttgtagctagaagcctgggccctccggcaatgccacatcccagggtgtatctttcttgccattgcagctggttaagacaacagcctggaaaaagattttagtctggcatgcagctgaagggaagctcctggagaagcatgatatacatggaaattttagcacaaaaatatcaagagaagtggcttttttttttttctttttccatctgaaagttgaggatggcaataccagagtccaggttgagcctagacactaatggtagatggagaactctcctgcttccaggacctgctggaagctggcctgtagaagctttggggttttgctttctcccaggtcacatgaaatgctgccaaaacaagctccagagttgtgttaataccacaggatttgtcagtcctagaatggaaacacattgccttgctttctttttgtgactatccaaaaattagaagacggtaagaagtcatcctgaaaactcccatggagcggaaccattactcatagtttcaaagacagtccaggcacttagaatcagaagttcttttcaggttctgtttatttgttttgctaacagattccttttttcagcaagaatccatttttagacacagggaaactgagattaaacagtgcatggtaatgggtgcaggcctcacagtgatgaaggggcagtgctgaggctctgattcaagtctgacttggagtcctctttccacctaaccgctgaagattaggaggctgagggagactagaatcagggttgattccattgaaactatgacatgccttaccaaaaatagcattgtgatttcagtgcactcacatgggcaggaggtgggtggctttgattccggataaattgatgactgaatgtgaaagcccctgaagctgtgtgtggggttcccactggggtttcttcagacctcatgcactgcacctgcctttatccaagagcactttcctgccaggactgtctaccctctactttctcctgcactcagcaggccacttttgttggaatcctaaatctcattctccgtgctggaataaagcattctgtatttggagaccttggatggagcactggtctccaatgtctggtattggtgggcatagaattattgtaattctacactaaagctcatcactgacttttctttttatctttcttatcattttttttttcactatgtagactgcaggaacatcattgacttttacaaccaaagccactcaaagcccactccttgctagttgacttgagcttagaaggggtgtccatgggagaaattaatgagcaataaggaaggatttgtttttctggaaggattggagctgcctccttttcttgccccagagatggccaaaggccaggtggctcttggtagctgtggtgatttttgccgcccatttcctgataagcacagaaacaagaacgctttgtctcctgaggctggagctgagcagcggattctatttgttagggggcctcagaaagaaactgcccagtgcccctaagaatatttctccctgcccgctaagctcctcctcttccgtaaaccttgctgtctgcagatcacctcctcctcaggcccctggtcatgcctaaagcagaccttttattaattcctgcacagggctaggcctgaatatgggctggggatgaggccaggctagtaagggagagaagtctgaccagagtggaatggggtaggtgccctggaggtgtggggacagtagggaaggaatgtgatgggccacagattacttgcagctgaaagagataagggatgaggatttgaacccagtttgacaggtaggtaggtaggagccagatatggcaggagacattccaagtagcttgaactcagtaatgaggaagctgagcaacagcatgtagatgtatctacaggatgatcttcccaggccggcgccggggttcacacctggaatcccagcaccactttgagatgccaaggtgggaggattgattgagaccaggagttcgagaccagcatggccaacatggcgaaaccccgtctctactaaaaatgcaaatattagtctggcatggtggcgcttgcctagctgctcgggaggttgaggcacaagaattgtctgaacctgggagacagaggttgcagtaagccgagattgtgtcaccactgcactccagccctgggtgacagagcaagattctatctcaaaaaaaaaaaaaaaaaaaagggaaaagcaaattcagctgggtgcggtggctcacacctataatcccagcactttgggaggccgaggtgggtggatcacctgatgtcaggagttcgagaccagcctggccaacatagcaaaactctgtctctactaaaaatacaaaaattagctggacgtggtggcgcacgcctaaagtcccagctactcaggaggctgaggcgggagaattgctcgaacccaggaggtggaggttgcagtgagccgagatcgtaccactgcactccagcctgggtgtcagactgtcttaaaaaaaaaaaaaaaaagcaaattcagtatctttaccataattaggaaacacactgaatacatataaccattaaaataagtaatggccattaaaattaaaaccatgcctccatggattaccttgatgtatccatcactttttgggaaacattgtcagtttctaacaacattgagatattacaaaatatcaaaattgggctaggcatggtggcttgtgcctgtagccccagctactcaggaagctgaggctgaggcaggaggatcacttaaggccaggagtttgagaccagcctgggaaacacagcaagaccccatctctaaaaaagtattttttaaaattaaaaatttaaatatcaaaattaacctacacttttccaccattagagctttattttgtttttgagttttccacttagtagcaaaactacagttctttatgtttgggagacaaacaaggtaatgaatcttaaaccataatttagtcagagtcaaaagtaatatggaacctgagttctgcttttgttgttgtttttgtttattgataagaacttatcacatgataattagcccattgtcttcattctgtaaccacttattaaacacttaccatgtaaacaatgagaaactttgttttcataaaagtctaggagattcccggaaaccttcagggaacgagccctcaggcttcaagaaaagccaggatttttcgtaaagactgttttcagggagtgcctggccagaaaggtgagacttgcaaggagagacatgggcggagcctgccgctcactccttcaaatcccaggtctggggcagtccttgtagattccaccaggattggcctgggaaagccggcaaagcaagcaggtgttgctcttccaagaggagagttctccataccttgtggagcctgacatgggagagaaagtcctgtctagggccagggtttggggaactgagatacaagccgaaagccaagctgcttttgagaaactgtgataatccttcctccaactaactgctgacccagtcatcccagtgtctccagatgactcatgtaagtagaagcaaacagggtaccttgataaaacacaagggtagaccacagatggttccagctccaaggcagatgtgatactgacagtgctgagacacagctgctcgcacagacacacggaagggagccagagaactatggaacttcccctaggaaagcatcatttgacttacgggccacaaccaccttatttatctccataggggacttgccattcattctatgaggggttttcagatattgttaattaactaaaccaatcccatcctagctgaattatgatctaacagtctgctatagactggaaaaaaatatatacatatacatatttttttggagacgcagtatccatctgtctcccaggctggagtgcagtggcgtgatctcggcttactgcaacctccgcctcccaggttcaagccattctcatgcctcagcctcccgagtagctgggactacaggagcgcgccaccacacccagttaatttttgtacttttagtaaagacagggtttcaccatgttggccaggctggtggaaaaatcatagtacattttaaatatttgtttgaaatcacttttgttcttaaaaaaaatcaggcacatcttaccatagatgatattaaattgtccatttaaaaactccagtttctcgggaacactccccaaggcaacttggaagtatgccccagacaaaagtgattgtcttgaatgattttaattttaattttatttatttatttattgagacaaggtctcactctgttgcccaggctcgaatgtagtggcatgatcacagctcactgcagcctcaacctcctaggctcaagcaatccacctccttctgcctccgaaaatgctgggattataggtacaggccactgcaccaggccgtaattttactttaaaaaaaaaaaaatctaggctgtacaccgtggctcacgcctgtaatcccagcactttgggaggccaaggcgggggattgcctgagttcaggagttccagaccagcctggacaacgtggtgaaacctcgtctctactaaaaaaaatacaaacattagctgggcatggtggtgtgtgcctgtaatcccagctacttaggaagctgaggcaggagaatcgcttgagcctgggaggcagaggttgcagtgagccaagactgcaccattgcacttcagcctgggtgacagagccagactccgtctcaaaataaataaataaaaatctaattgctcggcttagtgaaggtgtggttttacacacatagaggaggtttagggggctttttgttttacttgtttatcctcatgtcctgccactgagggcagagccacacagggcacagcacacctgctgccacccacagcctaatggatgtgcaccatccttggttgacagagtaagaatttgtcattttgccttgaactttatttttgctatttaacagccaaactaggtttcttatatctagaaagttgttcactttatttactcagtcagtaagttttgtcacagaaatggcctcgcatcacatttctgtgtatttttgccttattgtctctcatttgcaaggtcaaagtgtacatttcagatgtatggttggggatgcagctcgcgggagcgggtgatgtagggggaggtgcaagggaggcttcatagcatgctttgtctagaccctggtcactaggactggtcattaggggctgcgctggtagactgtaatgtcttctggaattctgaattaggacaagaaaaggcatgcatcgtttggaagttctgctctgtgtcgatggtttctctgaggtgaatctgattctggcaatgttagtaaaactaacccttgtctgcctggttgtcctactcagaaagagctttctgcaatcacttactctcccacctgctcaggcgactaatgttgggccatgggaaggaaggaaatccagcccagtggaaaggcttctctcatcccatactccaaagaaccttaacctggttgtcacgagagcaggacaggtgctggagagccctgcccttccaaagtggatggaatatccacccatctgcttcacagccatgaggcccaggtttggttgtaattggaatgggtggaggctgtgacttttgggtgagtgtttgttctctgcccctagaggcaccttatactttgcgggccattctatggtttgcccattgtattcacatgtgggtctcactgtatctgtacctaagttttatctccccatgatagcagccctagacacctagacatagtgggaatggctgcacaaataaatgagttttatagttataaaaactcagtgagatggtagatattattacttctcctccaacctattattttgagaaatttcaaacattatggaaaagttgcaaagatagcactgttcagttaattcactaagtgctgaaattttgctacattttctttatctccctattttttttctttttagggggagctcatcatttgacactttctttctttctttcttttgacactttcaaacatgtttatactttgcccttaaatttttcagtatgcatgtcctaagaataaaagcatttttcctttgtaagcataataaaattatcacacttaaggaaattctccattttattttattttatttttgagacagggtcttgctctgtcacccaggctggagtgcaatggtgcagtctggctcactgcaacctccacttctcgggttcaaacagttctcctgccttagcctcctgagcagctgtggctagaactgtaggcacaccccactgtgcctggctaacctttttttttttttttctttttttgggacagagtctaactctgtcacccccgctgaagtgcagtggtgccatctcagctcactgcaacctccacctcccaagctcaagcaatcctcccgcctcagactcttgagtagctgggaccagaggaacgctccatcatgcctggctaattcttttctgtatattttgtagagactgggttttgccatgttgcccgggctggcctcaaactcctgaggtcaagcgatccatacaccttgccctcccaaagtgctgggattacaggtgaaattgtcctttatagatctttttatactgatgccatatatgagttccaggctatgcactccatgtagttatcacatctctttattcacctcgaacctgtattaatcctacagcctgttaaaattcataacattgacatttttgaagttttggccattggttttgctgtcactgaaatttggatttttctgattgttttctcctgtatacattcaggtgagtcatatttgggagcaggaaagacacctaggtgacatggtaccttctcagagcctcacactgggggcacttgatgtcagggcagctcatttttggaggagttaacacagatcacttggttaaggtgacatctaccagtttcctccattgccagggtaccttttcattttcacaagtcattaagtgatctgtgaggtgatattttaagactatgactatcctatttcctaagtcttttgccttctgattttagcatccactcacaatttttgcttgcattgattactacctggtggtgaaggtattgttatttactattttcagatcaaaagggcgaggctcagaaagggacctgagcaaggtctcacatgcccagctgagctaggagaggaacctcatgcttcctgccctgagcttggctctgtggccattccactatgaccatgtttttattggaatctcctggattgtatcacagtgttttaccttttatgaacctctgttcactgccttccctcctgtttgcatgcagacacctttcttagaaatcgctagtttctatgaatctcatcaagttctgtcataggttgagttccctggaaggagagcctgatttggggcttcttgtgcaagtgattcagaagcagcctgccaaggagtgagggatccaggatgggaaagggaggaggcaaggcaaagacgtgggctctgcctggtcccacagggagctcagcagcgtgaatagccccccagagttgtctcaactcaaggctagaaggccactcttctccatctcacatatgtagaaagtacatatcagtatgtcactggcagtgagtctgctctcagggagaggatgtagcttcctgggcatttccaggagaagaggggcagctgtgagctttccacagccaacactcgcagcagatggggcatgggtgcctgccctagaggaggggctctaggtggagcaccagtagcatcccctacatgttcaatgttctcacattagttttttcctgaaggttgttcctgataaaagccaatttgtcctgtaataatatgctataaacctcaagtggctggctgaatcaaggtgtcagcttagtcatttgcaaaggcaagggataattatggttgctgttttataaggccccatgaatcttattcaccatcttcctgtctgggccctgctttttaggctgaggtcacttgtcagaacaaaggcttttcagctccttgaaaccacagaggagtcacaggatgcgcccttctagggaaggaagatatgtcaacgtgtttactttcagcacacatgagcatcacgattgtcatgttagacactgtccaatttggtcttggcaaaatatggccaacctgagatggcagtgataaaatatttatttagtcgccaagaattcttttagtggcatggtacccatcccgcgcccgcagcccctagcaaaacaaaaccaaacccctaattgatctgagttaatatgcatgttttacacttggatctcaggcaaatgttccttacagtgttgtcctcagattggtcactgagagcttgttagaaatgcaatgtctctggctcaccccacacctgcagaagctgtgagtctgaaaccaggaatctgtggcttaacaaaccccaggtgactttcacgcaggctctcaagtttgacaaatactgatccaaagtagtggttgtaaacttggttgcacgttgggatcccctggggaatttttttttctttttttggagacggagtcttgctctgttgcccaggctacagtacagtggaaggatctcggctcactgcaacctccacctcccatgttcaaggctgcctcagcctcctgagtagctgggactacaggtgtgtgccaccatgcccagctaattatggtatttttagcagagacagggtttcaccatgttgaccaggctggtcttgaactcctgacttccagtgatccaaccgcctcagcatcccaaagtgtgctgggattacaggcgtgagccactgcacctggcttttcttttcttttcttttctttttgagacagggtcttgctctgttgcccagcctggagtgcagtggcacgatctccactcactgcaacctccgcctccccaagttcaagcaattctcccgccctagcctcctgagtagctgggactacaggcacccaccaccactcctagctactttttgtattttagtagagacagggattcaccatgttggccaggctgatcttgaactcctggtctcagatgatctgcctcccaaagtgctgggattacaggctttagccaccatgcctggcttttttaggtgatttttatcagcagccagggttgagaatcacttgtctaaagctggctcttttaccttctatgaaaggaattttaacaccagcttcactttgaagagtatgtttttttaactgcaaatattcacttcccaatacctgcaggccctggaatggcatttgcagaaggagaaactattctttttggcacagagtctcctacctggaaatttgtagcagaagttgagcaaagctttcacatatttgagaagaaataaaaagataaatcttgaatgaatgagtgagattccttaggcctgcagaaagtcacgaaggtgatggagagaagttaggacgggggtctctggccagtccacatgccaacactgggtattattattgagtctgcacacccaaaaatgatcggcataggttggcttcttctaaattcagtcccacctcttaggagtagagttgtccatgtggaaatatcacacttccttcctttaatttcctttttataactcatcatacattcagtttcattatccatccttctcagtgctaaatacattatctagttcacacagttgagttcctttgggtttagaggattgaagaccatatgtacccgaatctaaacctgcttgtttggacatgaatggtcaggtctggtgtcccttggctgccccaggatagggcttgatgacctgctccttgagagccaggttaagtgtcagttctgagtttggtaaagggtgagagaacccagagcgaagctgccttggatggaaatgtcagccccctctctctgaccaggggcttgaccttgagcaagatcctgacctgagctaagactcctggtcctctctgtaaaaccgggatcatggtgcctgtggtccagggctgccaagaggagtaaatgagagaatgtaggtaaagggcttggcacacaacagccgctacatggatacaaactgcccctgtgtccctcacccctgtgcccctcacccctgtgtccctgacctgacttggtacccacaacattggataaataccagagcatgtgtaatttctagttctgctgtttcaaggctgttatcactcaggacagctcagtaacttcttaggcctcggtcttctcattggtaaaatgggaattaaacactcactgacagaaccagtattggcaccaaaaggatgtcaatatggtttggtcattaagacgtaattcacataccataaaattcacccttttaatgtgcatgattcgcgggttttagtaccttcacacattgtgcaattatcaccactctctaataccagaacatttccatcaccctggaaagaaacctggtacctgtttgcaatcgctccccattctcttttctctcccccattctctggagcccactgatctactttgtgtctctgtagatttgcttgttctggatatttcatgtaaatcgagtcattcagtatgtggccttatgtctggcttctgtcactgaacaagatgctttccaagtatatccatgttgcagcatgcgtcagtgccccattcctttttatggctgaataatattccattgtaagaatagattactcttttttttttctttttttgagacagggcctcactcctgttgtccaggctggagtgcagtggtgggatcatggcttactgcagccttaaactcccaggctagagccatcctcccacctcagcctcctgagtagctgggactacaggtgcgcatgaccacacctggctaatttttgcatttttagtagaaatggaatttcgtcaggttccacgggctggcttcaaactcctgggttcaagtgatctgcctgcctcaacctcccaaagtgctgggattataggcgtgagccaccacacttggccacattttgttcatccactcatcagctgacagacatttgggttgtttccgcttgttagctattatgagtaatgtcgacatgattttacgaatagcacagcatcactcctctgtgaggttttattataaataatgtcagtaataaaaatgcttagatttgtgagaagaaataaaatccaatcattcaggtacaaaataaatctgtgtgagtgcatttgcctttagactggggcatggttgtgcttatgagaaatgctactgagcattaggaactcacggttaccatccatgctatttcgcatttagggttctgtcctcaaagttagaaatgttttatattggccaggcagggtggcttatgcctgtaatcccagcactttggaatgccgaggtaggcggatcacctgaggtcaagagttcaagaccagcctggccaacatggcgaaaccctatctctattaaaaatacaaaaatttagccgggcattgtggtgtgcgcctataatcccagctactcaggagactgaggcaggagaatcacttgaacccaggagacggaggttgcagtgagcccagatcgcgccactgcactccagcctgggcaacagaataagactccatctcaaaaaaaaaaaaaaaaaaaagaaaagaaaaagaaaaaaagaaatgttttatgtcggaagacaaagcctgaataaatggcatttaggatgcttagaacttttgaaaatggggttaggaatagaaggtcaggtctgcccagtgcaaagtgttctttttaatattagagatagagggtaaaataaaacattgtgtctgccctcagaaagctttcagtctggaagagaagatgattaagggggcgatcacaagatggggtatgtgcggtggcaagcctggcctatgaacttgtagggacggtctccttgttagggaaatggtactgcagccagctgaccgtgccgcttctctttctcctagcatggtaagacacaaggatggtggctattccgaggaagaggacgtgaagacctgtgcccgggactcaggctatgacagcctctccaacaggctcagcatcttggaccggctcctccacacccaccccatatggctgcagctgagtctgagtgaggaggaggcagcagaggtcctgcaggcccagcctccgggggtaagactcagaacctcgggaagcaggttgaagcaggcaggactgctgccggcttaaagaaaaacacttggagttagttccagaaatttcttcctagcttgtaaggagcatgtctcttgatgtgtaactggttttcaatgcagaaatattctgtaaacccaggaacagagcccttcacgatgtgtctttctgtctttatctgctcagttaccatgggaggtacaaggatccagcagagaactgagcatctgggtagcgagtaggggccactggccagaagcctgggtctgacctcttgagcctggacactgaggatgagcctgggtctgagatccttggtggcctctgctaccttcctctccttctgagcctgggagccctgccaaggtccagccatccaacttgggacccagccttcaaaagttctgtgtccacagacttgcctgctctgtagtcctcttttccctgggctttccacacagactaaagtctaatatggtttcctcagctactgtctctccaagaccactgtccgtcccatccagaccactccacgacttgtggaaggtcctcaaaaaagtgactggagccgggcacggtggctcacgcctgtaatcccagcactttgggaggccaagacggacagatcacttgaggccaggatttctagaccagcctgggcaacacagtggcaccctatctctactaaaattacaaaaattagcccggtgtggtggcacacgcctgtaatcccagctactcaggaggctgaggcaggagaatcacttgaacacaggaagtggaggttgccatgagcagagattgtgccactgcactccagtctgggcgacagagcaagaatctgtcccccccaaaaaaaaaaagtgattggtatctctagtgctatccaatatggtagcttcttgccccatgtggctgtttaaatttacatgaattaaagcaaataaaattagaaattcagctcctcagttaccgtagccacattttaagtgctctctggcctcggctggctgccatattagatggtgcaaaatttggaacattgtcattgtagtacaaagttatagtggacggcatttgtgtacagtgtctacttccaaaggataaatacaataagtcacagataaaataatacttaacacgcaacacaagatagaaactaagaactagatggagaagcaaggagaaaatcccattagtagctagctgaggaatgtcataagaattgggcactaaatacctttttgagtttcctagcagtcagagtctgtctgttctcactttttaaaaaacatatgaatctttctttattcctcatcaggcagaaacaggtagaactaagacgtctgctagaacatgctcaggggaacaaggcacggtgctttctcatctttgcagagaatcccttggccataacacagagctgctgcctctagttttgttctataggatcaggatttcctcaccttctgtgaagcctaactttcagccagttgaattgtctgctcttgcatttctgcaaaacattccaaagacagaagttgctgcagagctaggcaacagcctgcccagctccccctcccaaggtagggcacgtccactcttgctgaaacctgcatgggaaacaagccaggcatgttctctccatccacctgcctgatccctgcacagggcctgcctgatgagattgggcaggttgagggcagggccaggacaggagtaacgtggaccaggacagtcaagaataacgaagggagaggccaggcatggtggctcaggcctgtaatcccagcactttgggaggccaaggcgagcagatcacttgagatcaggagttcgagaccagcctggccaacatggcgaaaccccgtctctactaaaaatacacaagttagccagccatggtggcacgcacccataaccccagctactccagaggctgaggcaggagaattgcttgaacccaggaggtggaggttgcagtgagctgagattgcaccactgcactccagcctgaatgacagaccaagactccatctaaaaataaaataattaaataaaataaagaagagagagaaaagcaggtggctaaaagtgtgtgaaaaaggaggatttgagagactggccatggtggcatgagtgaagtgggctcttggggtgcccatccttaattattctacaatctaagatagaggtccacagactgtttctgtaaagggcaaagtaaactatttttggctttgcaggccatagagtctctgtcacaactactcaactacactattgtcatgcaaaagcagccatagacaatatgtaaatgatcgagcgtggctgtatttcactacaactttactcagaaacagatggcaggatggatttcgtctgcaggccagactttgccaacccctgatataacgtaaggctgcagtcctccaaaaaataaggcctagaggttgcactccccaaccccaaggctcagggagatctccacttggaaaagggagtgttacttcctctcctaacaaccaacagctgcctctccacagtgctttggcctcttacccccctggatgctatttaggaagcatctgcttcagttttagggtgtcccagaggcactgactcccagaacctgctactggatgagtcctatggatgcatccccatggtgccaggagaaaagagaactcacggtcttccagcttcattcttcaccagatacccaagtcccatacccatcttcccaccccccaaataaagtatcttatgagatatcaactggagataaagagaggagcaaagattaggcagggaaaaaatgaaaggctatagaaaggtaggggagagaataggtagagagtaaggtgtttaaatgcagaggaaagagaagtagctaaagaagcatgacagacagaataggagaagggccatgctccacagaagggaaccaggactcagctgggctgccacacgccatactccagggagagtcacttcatttgtaggctaggtgaatggtgcctcctggagttgtgcagtgcacggcctacacaacagtacacagcatacttaactctgcagtgatgagggacagaatggtgtcctgagatcagcactaggaattgaactgttttaaagcatgtgtctaaagacaatattaggatcttgagggaactggtagaatgtgaagtgagtcaggaataaatggacagcctccatgtccaccggggtgaacttcagagtgcatccacccaccacccaaatggaacagccatttttcagctccagtagattgttgcctggtcttgctatatcatctcattttccaagaggagctagaaattcagatttcaatttgaaaacaaaaaacaaagcaacttctgctttttcactgttggccacaaacttaaatttctattgtaaatatcctcataagccaagttaaccaatgaaatgccaattcctatggtttagtcatgttacctgtgtttagaatttaggtttcaccaaccaagatatataagacaggggctacagaatataactcatataagacaggggctggagaccgtaactccagcagtaaaacagtcactgaactgaaaatgcttatgcagactaggggagttcttagccccatggagaagcttctgtcagagggaaagcaggattcttttggaggcagtaatgaacaaaggtgtctgcagcctgtgctctgagcacccctttctatggcaggagagtttcctgcagggagccatgcagtgtggatatgaagggattctattcattgagtgtgagggaaaccagatgcttgggttccaacattctagatatttcctaaagcttgtatttcttttccctccactagatcttcctggttcataaatctaccaagatgcagaagaaagtcctctccctccgcctgccctgtgaatttggggccccactcaaggaatttgccataaaggaaagcacatacagtaagtggtcattggatgctcaggtcctgactgacagggccacggggctctgcagggagtggaaatggaaggagctctggttatgagatgggcagatatgggcctgagtcttggcactgaatgactaggcagataacctactccaggagcctcagttttctcatctgtgtaatgggatgatggtaacctctgagatgttaatgagtcaaacaacctgaatataaagtgtgcagcctactgcatggcatatggtagggaactaatagaggttgacttcctctccccctacccagttaagtggaacatgaattcagttcccaggtttgccagtgactaagttgcaaggagactgtagcgagagagccctttcacgctaatcctaaatcctaaagcatgtgtctgcacttcttcgtgaataaataatccctgagcagacctgttccctccaggcaatcagtgttcagtcttctatgaaatgcagctaatcagaggcagaatccaaccttttgatgaacattttgaagggagagtggtgttcagaagtgttggttttctttctgctgttccacgattggtcattggaaatgtgaagtgtcgggaggccaaattttaaataaaaaagggaacacccagttctgatgtactgccagcctccaagaaaggatcggaagatggatctgcacatcaaagggggaggagtgggaggagcaggccaggaggagagagctcagaagcaagacagagcctgggattcccacttgcttcccgatttcccagcacctcacctcctgcatttggagaagctgaaggtgtagatgaaggtcaatttcagggccgagatgagattctactcagccgggagggcacaatcttgctgagccaaatgaccattaactgagttaggggagggtaaaacctgccaggctgactgtgaaccgcctccagctcaattgtcaacctggatcttacaagtccacaaggtcatggatgccagggaaaaacttccccctgaaaggcgcacaagcaggcggaacccagccaataatgtaaatacattaggatgcaaccagaaggtacattgcaaacccactgcttgaaaggtaataaattcatattgagctaataatgtgttaggtgaattgataatgaatttatattaagtgaatcaattaagtaattctgaattggcttttgaaagtctgcgagaggctgggcaccatggctcacacctgtaatcctagcactttgggaggccaaggccagagggttgcttgagctcaggaatttgagaccagcctgggcaacatggcaaaactccatctccaccaaaaaaaaaaaaaaaaattagccaggcatgatgacacacgcctgtagtcccagctactaaggaggctgaggtgggatcacttaagtgcagtgagccgtgatcgtgccactgcactccagcctgggcgacagagccagaccgtgtcttaaaaatgaaaaaacaacccaaaaatattaaaaaaaaaaaaagtccacaaggcaagaagccacagatctaactggttttcaaattcctccctaatgtccaaagtggagcacgatggatgtgttggtcggaagccacttcctctcctcttccagaagtgtgggcaatgtgtgtggaagcttcctcgttgttcattgaggtccttgtggccgaaggtttttcccccataatttgacaaggcctctaatcacttccctaatcttctccaggtgacttcaagtggttaaaagagcttgtttaaataaagcattagcctggtcataactagttaccacaggcctgggtcccactgcaatggccccttctcagccagggcctgtttatcttctctgtgaattgaggtgaaggaaggacttgctataaaaacattcagggaggctgaggtgggcggatcacttgaggctaggggttcgagaccagcctgggcaacatggtgaaaccccgtctctactgaaaacacaaaaattagccaggtgtggtggcgcaagcctgtaatcccatctgctcaggaggttgaggcaggagaatcgcttgaacccgggaggtggaggttgcagtgatccgagatagtgccgttgcactctccagcctgggcgacagagtgagactttatctcaaataaataaatattcagatattttgtcataacttacagacagtgcagcttaataataaacaacacctcatatttggaaacaatgctttcacataaattatttcatttttaaaaaatttcatctccccccaccacccttctgggagataaggaaagtactgttagggtccattttccagatgagaaaaccgaggcttagagaagctaacctgctccaaatcagttccctcctccttaactctacaaattgtggcacacgtgtgtttgttgtttctgtgtgtctgtgtgtgtctgtgatggtatatgtgtagcggtatggatgttttttgggggtgctacagaaataataaaataatacaaaaaagcgaagaagcagccggcgcagtggctcacacctgtaatcccagcactttgggaggctgaggtgggcggatcgcctgaggtcagcagttcgagaccagcctgacatggagaaaccccgtctctactaaaaatacaaaattagccaggcttggtggtacatgcctgtaatcccagctacttgggaggcttagacaggagaatcgcttgaacccgggagatggaggttgcagtgagctgagattgcaccattgcactccaacctgggcaacaacagcgaaactctgtctccaaaaaaaaaaaaaaggcaaataagcaaaataaatgagggtatgagtgagaagaaacacatcggattgaggaaatcttcataaaacaggatatttcaaatgtttagaggaatatcagtgtgagttgctcagctgaggtggtgtgagggctggctggcaaattcatgagtatttgaagtcagactacttgctgctccagcatttggaagatgtgcagaatgccacaccatcttgccagtatgtgtcttttttttttttttttttttttttttgagacagagtctttctctgtcacccaggctagagtgcagtggctctatcttggctcactgcaacgtccacctcccaggttcaaatgattctcctccctcagcctcccaaatagctgggattacaggtgcatgtcaccacatccagctaatttttgtattttcagtagagacagggttttgccatgttggccaggctggtgtcaaactcctgacctcaggtaatccacccaccttggcctcacaaagtgctgggattacgggcgtgagccaccatggccggctcagaacatgtcttctgtgttagaaaatgtgaacactggagcaggggtggaggggggaacaacactccaagtaaatgggttttagaatctttgttttaaaaaaaagtgagagagagagaaaaaaaaaaagagagatgtagtctcgctataatgcccagactggtctcaaactcctgggctcaagagatctccctcctcggcctcccaaagtgctgggattacatgcatgaggcaccatgcccggccagttttggaatctttcatgttgaatttaaccaaaagctgatttcagggaacttgttatatcctcccagctctacattccttctcccgtgtgcttttatcacaggtgctctgttatggcaaaaaggagtggccagggaagtgtgtgtcctaggagggtcaagggatcgaggggagtaggggtcttggtgttccccaagccctgtcctgtgctgatacaatccagacagactggccccttgtcccctgccctttgtgttctgaagttaaaaaaaaagacagttgtgcaactcgagtctgtcctggtctgtttaccaagcactggagcatgtgctcggcatgagtcaagcgatgaacttccagatcatcgactgtttaccggtggctgctggctgacatgcctcctctgcacagctggttctgataagccacacggtagtttgtttgagagtactcagatggtcccacacacatggtgttaggggctcttcctgtcccagaacgtgctcagggagaatcagctggtttctgaaatctcttttccagccttttccctggaaggctcaggaatcagtttcgcagatttattccggctcattgctttctactgcatcagcaggtaaggcctcttcctctcatatggtttcaaggccctgtttggtgtgtgggatataattaacctgaggtttcttgaaggatctaggaggctggccacctatttgatgttggcagattaagactggttacttaagtaaaatgttcaccaagtgaacaggttcaccaagttcacaccatgccaggcttaaggtcaaaacgactatcccaacccctccaaacataaattatccttcatatgattatttcttcaagctgctcccaaggctcctttcagccaggcccatcaagcaggaaacacacacacacgcacatatgtgcacacatgcacacacagacacacatgcacacacatacatgcgcacacacacctacacacagaaagggaatgtgcatgcaaacctgtgactttgaaagcttcatgataatgcctctgaaaactctgtaagggatggagttcattctacaaatgtgggttccttaaaccagcccatcagtcttgtccttcaggccaactgggtgctcatgtccttttcataaccaaagcaactattttgttctatacaatgttaagtccaaaatcagttttttgttttttgttttctttttgagatgaagtctcactctgtcacccaggctggagagcagtggcgtgatcttggctcactacaacctctgcctcctgggatcaagcaattctcccgactcagcctcctgagtagctgagattacaggcgcctaccactatgcctggctaatttttgtatttttagtagagacgggttttcaccatgttgaccaggctggtcttgaactcctaacctcagatgattcacccacctcggcctcccaaagtgctgggatcacaggtgtgagccaccacgccccgcccagaatcagaatattaaccagagtcaacagggtgtgcattgtgaaaggctttctttctttctttttttccatttttttcttactagcaataacagttttttcacatcaagtgttttttcagtaattaagaatcaaaattcttgttatctgcagggattggcattgcctcctcttatggggctgagctcaatttggcttccttttcttctctgtccatggcagctgatatggcagagacaggaaaatgtgttactaggatgttttcagacatcacttctcacagctaacacacgtataggctggggagtttatttgagtttggctcggtttattttaatttaaggattaggttgtttctcaaagactaaatgcctgttgactagactctgccagagggcaggaggcactacgcacttttttttttttttgagatggagtttcacttttgttgcccaagctggggtgcaatggcgtgatctcggctcactgcaacctccacctccttgggttcaagcaattctcctgcctcagcctcctgagtagctgggattacaggcatgcaccaccatgcccagctaatttttgtatttttagtagagatggggttttaccacgttggccaggctggtctcaaactcctgacctcaggcaatccgcccgcctccgcctcccaaagtgctgggattacaggtgtgagcaccatgcccggccaggagccactaagccgttcaccctctgaagtctccaggtcagctgaagccacacaataaatggcctcaggaaggggaggcacttccagaggaggaattcagcgctgctcaccagcaggaagaaaatgagggcttcactgagaatgggactagtacctgggggcacctcccaagaggatgcaacctgcctgccatgatttgggcaggatctcttaagcctgtgtaaggaaatgaaatgtgctgcccaaagagaggaggctggtgcagaagcacagcccccaacagacacacacacacacacacacacatatatacacactcatccccagggaaccacacctggtatggcctaaagccaaccaggttggaggagtaagtctcaatgctaacacgttggccaggggtgaagccagctgatatttacttttcacagtttgctttttggtaattgtggagttgctgggaaaaatcattacacctacaaagcaatatttggcagtagcatagaaaagttaccatcagtgttcatggtagactggagtacctgctgtccaggactgtttgaagatgcaaggagataaagtatatgaaagccttataaactataacacatgataccaatatataaggtacttacaggaaaactccaaaattgatgttttgcaggtaggaaggccaagattaatttccctgtctgttccaaaatgcaaagatatttgatgtttttgtttctctttctatgctactcatctatgttcttggcaattggtagttgatttactcagtcttacaagaatatttgtgacattttttagttggttgttagtatataaatatattcaagtaaagaaagtgattggattattggttctggtgtttcacacagcatgcatatgcaaatatgcattgcacaagagaattcacgaatcaataaacataggatttgccatagtgggaaggctcgctgaaaagtgtcattgagaatacaaatagtgactgcacaccttcacccccaatgcctggcaacgctctgttgatttggtgttatcagtgtagtagtgagagtactagagtcatttggagtcttgctaaatgcagaatccggtacagtgggtctggggtggtacctgaggttttgcattttcagcaagctcccatgggttaaggctaatgctgcttgtcctcagaccggaatagaggaatagaggaaataataattttaggggtcttctatatctgtactaagcaccatacatacatatttctaatccttatggcaaccctataaattaggatgatgaaaacactgagacagaaaaagtgaagcatgtgcccacaatcattcaatcagtaaatgacagttacgggagttgaactcaggcctgccttaatgccaaagcccgtattttcccaccatactattcagctgctgagaccttagggtccaacacatccaggttttgaccctcacttcacctccattagctctgcgaaggtgtgctagggacctcacttgtctgtgtcgtcatctgctcctgatccacagaatgggggcatcacggcttcctcccagggctgttccaggccccacacgagttacggtgcctgctgtaatttaatagtagttgcccgatgatctttgtcccctcccctttagaaatctacgtatagagcaaagttaaacaaaataaatctagactgtacatgttttaactcttgggtgaaacatttatatctaagatgatggcttttgtttttctgttatgcaagctttagaattgaggcccctttctttaataggatgtaagtgagaaggcgtccctgtgtgagtgtgtgtgcgtgtgcatgcatgtgcatgtgtgtgtgcatgtgtgtgtgaagatgctgggatgcaccctggctggcacagtgggagacgatgcatatacaacatctaattttctagtagatcaaagcctgaaaccatccattaaccaaggacaggtgtggcttcctgtcatatatcattaagaaaaccccaaaccagtcatgtgacgtttaagctccaggtactgcattgagcaaggtaaaagcttaatataaacacaggttggttttgtggtatgcagctttcccccaaaattgtctgaggaaagtagattttaattaagttggtccggccacacaaacatatatttacagtctagtttggtgttacaaggttgtggttcccattaatcttcacttgagattagcatcagggttgccgccctgccaggtcaggcagcagctattacagacacagccatcccctgcagtgctgcctgcttcatctcaaacagacacaagtggccaagcaaagggggtgctcacaacatttgaggacaagtgaaaggtctcatggaaggaagaggtgatatgggcctgacccccaagaacagcagcctcctggctttacattagcagagtactacggtgtcaaaacattcttgcttttttcttcttttcattgacttactaatttgttattcattgttaacagcttccatggctccaaaattctccagtcatccagatttaatctggtttatccaagaatgttgcctaattttaccgtaaacaataggttgtttggtatcattattctcgtcagtggaaattctcagcacgtctcatgatgacaaagtccaggcaggactccaagttttgttccttactagcaccttccagccgcagtggtctccttgctgttcttcatccatgccagaccctccccaccccagggcctttgcacctgctgctcactctgcctggaaggtccttcccctcatgatttaacccctggccaccattagatcttcagtcaaatgctgcctgctcacgaagacttgtctgcccaccttcacactcaaacactctttattctcctttcctgcttcacttttatccatgtcatggatctccttctcatagattctgtaaattgtgtatttgtttattgtctatcggtatcccctgacatggagctccatgcaggcaggaacttccgtctgtttcgttcccagcccctgatgcaatgtctggcacattgcagatgatcataaacatctgtggaacaaatgaatgaataattatttctttgtaagactattaccaccactggaaaaaaacaaacaaacaaaccctcctttttgattaagtcaccatatttattgaatattcattcattcattcaagtacttcctgcctgtctgtgtcaggacagtgttgtgctttgccctgtggggaattcaccagtgcttagagcatggtcctaacctttgtgaatgaacatgagcaaatgtttaagtctgcctttgccatttccaagaaagcaagtcatggcccatggctgtggcaggtccctgatgctggctgggctctctcctgttgggtctgttgctctctctgccatgtgtgtttgtccatctgcacgtggcaccatgctgcttgggtgctggggttattggcatgaggggtcttagacttgctttcctattcaaagcctggtccagggtccagcagcatcagcatcctctaagagcttggcagaaatgccgaatctccagtccctcccagacctctggaatcagagtgtgcagtataacaagaccctgggtatctatctgtacattagagaagctctgccttcaaacacaggagaacgttttgtctccagcacaccaaggccaatgtgtgggctgtaatgggaagatttcataagtaaagccaacagatattcattgagagcctgcagtgtgcaaggcaatgggctaattcatctcggtttaggattccacattcctgcccaggcagtttcggcccaacattcacataggcatgcagtgaattagtacataatgttttatatgcatgctagatctaccaacaagtcagcaattctgatgtaaactctacatacgttttagctactcagcagggcaattgggtccctactttgatactgaaactatgctggtttttctctcagcctgtcctgagtgtgtgataatacagacaggaattttaagtgttaagttttaccaccaggaaagataactttgtcgatatggtatggtgtctacttaggacattttaaacagtttaagctaaaacatctctatgatgaaaataaacacaagatagaaagcagacatgtaattacaaacattctctctttttctgaacaatcagggatgttctaccatttaccttgaagttgccttatgccatttcaacagccaagtcggaggctcagcttgaagaactggcccagatgggactaagtaagtgtgtgccccctgcctgagtctatctaaaaatgaatccatggagcagagtcaatggtgggctcactgaggctacattgctccgtcaatctctccagcttctccatcagtgagtttgggctatccaaaatgttgacgtcctcttgtaaacatctgtaacgtgttgatgtcttccctttctgaggcatcttcctggggagaggcagcacttgacagaaagagaaatccagtgtagtgcatctcgcgtgcatgatttttttttttttgaggggcacacgggcattgatggcacttctgtgctttgaggaatttgacagcacagacatctagagtaacgtctgttccacttcctctcttgtcgttcaattcttgtcctgctgttctggtccatgtcctaaccctgccggggatccttggtctggcagctgggtacttgcttccccgtcctgtccctttgccgatgtcccctaagtccccacaattctgccggacaatggttgacaatggatcaagacatacaactcacccactttaacgtcttttccccattgccttgggggaatctgtgtgggtttagcttttgcaaaaaatgttcctcctagatcaaaagaggaaattctcttaagattttaggacttcactcactgtgatacttgacccagcaaataaaagatgtatgtattcctcctctggcatatttttctcttaatttaaagaacttgttttgaagcaagcgccatttccaaggaagcttcagcgaggagcctgggcatagctttgaattcccttctgctgaaactgcaattttttttttttttttttttttttgagagggagtctcgctctgtcacccaggctggagtgcagtgttgagatctcagctctctgcagcttctgcctcccaggttcaagcgatcctcccaccttagcctcccgagtagctggggtcacaggcacttgccaccacgcccagataatgtttgtattttcagtagcgacggcgtttcaccacgttggccaagctggtctcgaaatcctgacttttggtgatccacccgctttggtatcccaaagtgctgggattacaggcgtgcgccactgtgctcggccatgaaacttagattgtatctgtagaaggattgccttctgtgtttgaggcctgtctgatggcaagactgggtaatgggatttggaaagagaatactggtaaaactctcgggccatagaaacgtccctatttaaaagttgcaccttctcttgcaactaagttctgcatacctttggagagagattaaaatacttgctgaagttaagtcaatattgtcaactagattctaggcctcttgaagatgtgcaccgggtctcagttctctctcccgacctctgtccacatagctccagtctgatggtccacaggcttagtgagtgcatagtgctgagtctgaaggactaaagtgtcaaggacaatgcttgtgccatgccgagagaggtgaaaagagtttgctccagtggctactaaccagaagcgactgagggctaattaacatatattcgacttgtgattctcgatgtgcatattatccattttgcgtagagatagaatattttaaaattctgtgcctcagtaaaagtactgttcatcaaactaatattcctcgagggtctgctttgtggcagacactgtgccccagaccaaggactcaagggttaataagatcccctctcactccctgtgcctgtacctactgccaatgagatttgtagtttatatgggagatagatatacacgtgaactaaatatacaaagccttacaaaagatttacagctgtgacagtataagtctaaggaggactcaaaggaggtggaagtaatttctccaagacctgctgtcctgggtaatagaaacataaggctaatctgtgtgtaatttgaaactgtctagtagccacacaggttaaattgattttaataatttattttgttgtatttaatatatccaaaacattataatttctacatgcagccaatataaaaaattttaaggtatgaaatgttttacattctttttttcatatcatgtattcgaaacccaatgagttattttatacttacagcatatctcaaactcaggccctgaatgtttgtcagaaatacatggtttgtatttagatttcattaaattcacagttaaaaaggtagattctcataaccaagttccaaagatacttaaacgttttccagtaactgaactgaacatgagttctaaaatttaaattgattgacactgaatgagatttgatattgacttcctcggttgtactagccaacttcaagtgctcaatagccacctgtggctgttggctttcttgttggacagtgcgggagtcgggagagagaaggagggatacaggatagattacataaggcaggtgacacggctgtcaccacacagacaagggagagccaggactcccaaagggcttcatctcagtcctcccatggccagccattctgggcccatgggaaagaaagacactgcaaagcatagctagagatagagaataacccattccaggccaggcacagtggctcactcctgtaatcccagcactttgggaggccaaggcaggtggatcacctgagttcaggagttggagaccagcctggtaaacatggtgaaaccccgtctctcctaaaaataccaaaattagccaggcgtggtggtgtgcgcctgtagtcccagctactcgggaggctgaggaaggagaatcacttgaacctgggaggtggtggttgcagtgagccaagatcgtgccactgcactccagcctgggcgacagagcaagactccgtctcaagggaaaaaaaaaaaagaataacctatcccaaatggaaattataacaggcaccactgatcacagcactacctccctcaacttacatggaacactgagactcatctgcaagaggagacacaggcagtacagatcaataagcaatctgcactacttcgcagagcattgcgtatttatgagcatggtgaggaggttatataggatttgggaaggagggactccaaaccacaaaggtaaatggttgggcctgcactgcacattaagcttgctgtggtttttctgctgatgggacccatgaatgtagttttcctcctttggtggttttaatgctgaatgtgtaaaaccctaggcagattgtgtaacatcccccaggcccagctgctggtcctgcccattaaaggggaacttcaaggcccgattccttggctggcagctgcactgtggagggcatcccaggagaagttgttgggaaagggtggtgttgctttgtaagtcggttcagtttttgtaaagcaagtcaggaagccccagtgaccttttttgagcttatactggagcaattccagttcctttttttcttccaacttacctgtgaaaaggcagggctggaatcctatgttggccaagccatttctccagggctttgaaggtgacagacccctggagccttcctgtgagcccacagctgggcctggcagcctttctgccctttccagtaaaggaatgcagtaaacctgagtacaacgcaccccctaccccaccccgcaagactcgcgttgtcatgcagtgtgctttttttaatttgtgaaggaatggtctgagtgtaccgtatttacattcttgtgttcactgataatgactttcagatttctggagctccccagctgacagcaaacccccgaaccttccacctccccataggcctctttcctccgacggtgtctgtcctgcctccctgcgtcagctctgccttataaatggagtgcattctatcaaaaccaggacgccttcagagctggagtgcagccagaccaacggggccctgtgctttattaatccccttttcttgaaagtgcacagccaggacctcagtggaggcctgaaacggccgagcacaaggactcccaacgcgaatggcacggagcggactcggtcccccccacccaggcccccgccacccgctattaatagtctccacacaagccctcggctggccaggactgaaacccagacgagcatgccagaaacagtcaaccataacaaacatgggaacgtagctctgcctggaacgaaaccaactcccatccctccaccccggctgaagaagcaggcttcttttctggaagcagagggcggtgcaaagaccttgagcggcggccggccgggcgcaggcccggagctggagctgggcacagctggcagcccaggtggggccccgcctgaggccgccccgggggattgcacaagggccccgccgcccagctctgaatcacggcccccgtgccatggaggccggcagcggctgagcgacatgagcatttctacttcctcctccgactcgctggagttcgaccggagcatgcctctgtttggctacgaggcggacaccaacagcagcctggaggactacgagggggaaagtgaccaagagaccatggcgccccccatcaagtccaaaaagaaaaggagcagctccttcgtgctgcccaagctcgtcaagtcccagctgcagaaggtgagcggggtgttcagctccttcatgaccccggagaagcggatggtccgcaggatcgccgagctttcccgggacaaatgcacctacttcgggtgcttagtgcaggactacgtgagcttcctgcaggagaacaaggagtgccacgtgtccagcaccgacatgctgcagaccatccggcagttcatgacccaggtcaagaactatttgtctcagagctcggagctggacccccccatcgagtcgctgatccctgaagaccaaataggtaagtaccctcttttttaaaatataaaatctattgtaactctgtccgggcagtgcaacctatgtttgttattttttatgaagtttactccgaagttcaaaacaacacccagctccaccttctctcccggtttgaatggaaaaatcagtttctcaaagtagctgctgactgccagactcaaaaatgtcttcgggagtgacagattggagctgcacagtgattctgttcagggatggagtttggtcctctgtgggtccagctgccgcctgctgtggtaacgtgtgtgtgttacatgtgccgggtgtttctggacgcgtgcttctctgcaggctgtgcatacatacaaaggtagttttgttatcttctgagaggcagtgggtattttgttctgtcttggttgcaagtaaactttttattgaggtgtagcatatgttcagagagcacaaaactcacgtatgcattggaatgagtttccaccgcaagcttacctgtgggacaactaccaacccctggataagcagaacctgaccagcatctagggaccccgggccccctgttctccctcaaggttaccatcctgctggctcctcatcccatacacttctgtaagcagcacggcttgggagtaagcaaaaactgaaaaagacaagtttgttttgtgtaactttaaaataagtaacatagtttggaggtcacatgaaaggtgttttctccaacttcaaggggaaattctttctttataatctcatttaaaggatgagttgctaatggttactttggccaaggcaaatttgaatttggcaagcagtcttttcttccagggtgagaatgttgaaggttctttgtttgtttgtttgttgtttttaattttagaaggttgactcttgaaggttaatttcagagactttattcaccaggcagcaggagcctttggagctaccaaacatttccaggcggttcagaagctacaccccaattttttctttctgattgggtccatttgttgaaagtagtaaacagtgtgtgatagagggctctttctctttctctgtctctctctctctctcctctcttttttctcgtttaagtgattttcagcagctctttgattttctcacaaaggaatcaaagccttgtttgttttcttgtggtttgactgaggccaggcctggttgatcagggcgtggttaaagctggggtgttgctggagtgagtggctaaaggaatgtgcccttgtgaggtgccttctaattgaaaaagacatcaaggagacagcagaatatccacacaggctgcctttttccccatcccaccagagacccgctctcaagggagaccatatctgactcagtattaacagaaacccaacctgcaggagaagcttcctcttaggggctggggtcagaggggggtgcagccaggcaggggctgatgtcaggcctgagctatgtggccagcggcgccaaccagcccacagtgcctggccttccctccctgctgatgctgtaagaaccaacccaagttagtcccgggaagctcttcagccagctccttttgtagttaaattcggatgtggtacttgctcttagaactcaaggactcactcattttctccaaaaaacatgctaaaattatgtatttcactactctagaaggatgcagcctttaatttaaaatgatttatggagcttcgagtataagcccggcagcctgtccaagctattccagtgggtcctcacctcacccctgtgaacaggcatcgtcatcccttaaggattggaggaaggcaaggagggctctgccaggccatgccatttgtctgacagccacactctctagtaaactagcaggtgcggtatttgaacttccattggatcagaagcccacgtttgctgagctcactgttctgctgctgctgcttgtgtttctattttctcatcagtagttcaggggaattgtaactgcagggacaaccctgtgttgaggcagctcagactaaagctctctgttgagttatggatatggcctccacaagcattgccatgctttttctgtgggtttgtttggtttggtttttttaaacttttgcactaaaagcagtcagttcctcctgtttcttcaccagtgaaacagcattctgttttgaaagtatagtgacagtgctaggcttttgaaataaagaaggtgagtgggagcagaggtcaacctgagaaactcatcacaagtccaggtggaaggaaagatgcgaccctaactattagaaagccagtccccatagaggtgcactttattagattaggcctctgaccagaacatggacttagccagcccacttgtctatgtgggcttaaaaactggtctatgtctgctttaaaaaaaaaaatctagttctatcctcatttcctatagcttctgaagaagatagctctgaactagaagacagaattctaatttaaagcctagatttatggaacaacttgaagtcaagaaggtaggaggagataatacactggtttaatccatgtatgttagagcagtcattcttaggtgaaaatgaccctgtgaatgcatgcacatgtatccctttagtatatggagatactactcatctgtcttcttcagagggtggttcttcagttacatagagaaaagctaatgagaaaaacaaatagttctcagtcactttccttttgcccatgtgctggtgtcactatcctttctagcactttctagacaagtgcaaatgataaacagtgaatcaatctcaaaaccgaaaaactgcccctgtaaatgattatgttctctcatggagaatttgcattctatttagactaccctttggagcacttccaaccaaaagccctgctatgcagaggttcctgaatacatgttcattgcctggcaccagcttggctctcctggttggagagacacgggctcgttcctgtgtgtgccagctctctattcattccaggccacatactgggcttccctcccagagagccatcacctactctcacccttccagagtggtacatggaagaacagacaaatgctttaataagaagtgtgcagtttgggggccctacttaaagtattgggatcaacctcttcacggacagtgtgctgcgctcattactgatgacccatgctataggatgtagatggggtgaaatcacttcctgcttcaacacacgttcctcactggtgggtgttcacatcccaccactcttgctttagtctttttcaacccatgggggatatccaaccaaagtttctggtagagaaatcttcattttgcagaacttgttgcaatggtgtggttagtgttttcattttagtaaaatgatgtttatttctgacttgatgtcagtcttgggaaatccctctgttttcaaggcttgtttcaagaaaaacaaaatttgtccaaatccaaacatgttagtaatcttaaattttctatttcattcagatactctccacagactatcagcagtgatacaaaagagccaactattcatattcctagaagtcagtagcagaaaagagacagtactgtgcttatttaagtgctacaaaccaaaatgtatgttttctccaaagagcaatttaacaatttgaagaaaaagtacccttaaagtcaatttccacatatttcaaaggtcacttcgatttacgtatctgagtgttttttgtttgttaatagagaaatgatacggaaaatgtggttagacaccggagagtatagcgcatatagaaaaggtgattgaaatgattcccggggagttaaacaatcacaactactctggttcagatctgggttttttttgtttttgtttttgttttcaaatgagtatttaagctggctctagcttcaatatctagtgtgacttgtttttaatttttcaggtcacagtttggttcaagcccctgagttatctgggttattttttaagataaagagctattctggggccaggtgcagtggctcacacctgtaatctcagcacttaaggaggccgaggtgggtggatcacctgaggtcaggagtttgagaccagcctggccaacatggtgaaacccagtctctactaaaaatacaaaaaaattagccaggcatgatggtggatgcctgtaatcccagctactcagaggctgaggcaggagaatcacttgaacccgggaggcggaggttgcaataagccgagatcatgccattgcactccagcctgggcaacaagagtgaaactccatctcaaaaaaaaaaaaaaaaaaaaaactcttctgagaggtgtagccagggaggcatgttagtgccaaacagagattaaaaccttgaatcttctgacttctgatctagtacatgtgaccctatcgcctgaaggaacaaatgtccttgtagagttaacaagaggcagagaaaaagaagaaagattgtggtatgcaaaaggatacctatattatttccaaaaattaatttaaatagaagaccacgacaagaagcacttggttttcccctgtgggacatcttttgttgattaatttttactttagggcatcaaaatggggtcaattatgttacatcaaccaaaacaaggttgacacccctggagttgtgactctctgaccctgagcccctgactccatgacagcctgcacaagggggctgttagctcagtaattcggaaagaccttgctcacaaggtgggtggcggatggcatcacaaaataagtcacacgaagatgtctgctccagagtattttttgaccatattcctagagtctttctacctcccaggcaggaaacctcaccaggtaaaagaggaattcatgtaggaattgaggaatgtcacccaaaagacacctaaaatgctgcacgaattgtgtggcagcatcaggctctttagggcacacctatgtttttccacccctccactccagccaaaaggagggttcccactggctgcctctgtgaggccagcaccgcatagacgcagccctccctggtcctcaggtcctacccacagccttgtctcactagctcagtctctcaacagggaacaaatggtgtagacacagcccccactctcttctcgcagacacagtatccactttggagcttctcagttattgtccaggcccaggtgaagtcacagccacctcctctgtagagtcaaagcgtatgaattaaatgcatccctgtttttaaaagagccaagtgagagcactggtaatcactcctcgtgggcggccctgtgtggtttacaaagcactttaatgtataagaatcccttttaatcctccgaatgccttgggaggctccatttattgccctcacttctatagatgaagaaaccaaaagcgtagcaaggtcaagccaagatgcaagcgcgactgacacggtcccttggcaggccttgtctatacttctggtggcagggaattaccgctgccttccagttggttttatgtggcgggaaggtgacctcagaggtgaaggcacatcacaccagagggtactgctgtctgcatgactcatcactgaaattgttctcccaaccccctgacccaggccatgtatgccaggtttctgccctgtaaaattaaagattcccttctttccatactctgttctttggaagcaagtcacttagcactgcccacactcaagggatggagtagaattaagctccacctcccagaagcgggaggatctacataaattatttggaattcttccataagggagattggtctcttcttccctgctttcatttttcctggccttttactaaaagacactgaaatcaggctgatggattccctacatcaaatatcacacagatgtagcccatacttttgcagactagctttccttgaagcccaccaaaatgagcagaaactgaagtggatcaaagccccagtgcttgttatccttatttcggcccctttccttgctgggctaatgggatcttccttaaaatcataccgtgtccttcagtatttattatttatgagccaaagtgtgcatggccaacaatacttaaaaccaacccaggttacaggacatccctgcagagtgacagggtgccccacacctgcctgccccatgcctgggcggtgatttcatcgctagagttacacacctgtattctgcagggtaaagagaagaaacataattccatgtcttctcccaaaggaagaattctctgttaaacttcacacttttggagtgtgtgctgcatgagggcctcatgctggggacttcaggtgacactagactgcaggaaccccagtgtggttttcagagggcttcccctcaaagagagaagactaattgactctatgtcagggcggagacaacaaagaaagcagcgtgcttacgaggtgtcagatgcatacaattgctcctggtggagacgccacccagtcctcccagcaaccaccccgggaagctgtgcgtggccctattttacagatgaggaagctgaggctgggaaaggtcatcttctttgacggtcagaaaccagaaagctacccattcagacttggcatctgacctgagtgcctctgcaaccccaggtggcctgctgtttttttgcgtagtttgtaatagaggattagcaaaatgctgtcatggcggccctggtgtcatattttcaagatcctgccttccaccctcctcagccaccagctctgctcacataagatagagaagtttcttggctgaaagtcaggggcgagtggtggctcagaggaagggctcaggcaggtttgaagccctgactctgctgttcccgacttgtgggtgcttggtcatatttcttaatatctctgtgcctcagttgcctcaaatgtaacacggtgttgtggatgccattgtgctgtgcccactgacacttgcttaccagtctgacgtccagcttccagcacctgtgacattttgcatgaggctttcaccagagctctggcccagggtgggctagaaagcctggggaattgatgcccgtccacctccaggagcagcctcaaccagggactgaagggagcatgtgtatccataacccagctgcctcttctccagggggagcaactgtaaggcatgttcaacgccacctcttggagctccccagcagggctgagatccacctgccagtggtgataactggcttaataaagcaaactatattggctgccttctctccccagtcagtgcttcctgggatcacttctcaaatttaaccactcacactcaaatccttgtctcaggattggcttctgagagaatccaaactaagacaaatggggattatgcacccattttagtcaaagaattgtttaaatacctgtaaagtgcttagtagacatactgagctttcactcaatgttagttctgatccttaatccaataatacagccaaaggagaatatgttagcacataaaaaaagaaagcatcaagttgttttgccctttttgtaccaagagaggtctatgtgccatctcctgacttgtcggaaatagaagttacctggtttgcatttcttctccaccatctgggaaagtcacctgacttccaagcttcatggccatctgtaaaatgaatgacagaatgacagtagtcccagcgtcgtagggctgaagtgagggttaatgaggtaatacatataatattagaataggaagtgctcaaataaatgcccaataaatgttagcaattataaatgtttacattttcacaatttgacttccctacaaaaaaaaggcccatatcttgttatcaaacattagcttctatttctactactttacctttttaaaaaaaaatcagaatgctagaactaaaataagctaagaggtcacatgatctaaactcatggatttttaaattttaaatatgtttatgtatttaggaagtacgcatgcagaattctaacatgcatatgttgcgtagtgatgaagtctgggcttctggtatacccatcacctgaataatgaacatggtaacccaatgggtaatttttccaccctcacctccctcccaccctaacctcatgttgtatctttgtcaagtaactttaggttgtaacctgtacattttttgtttattattattatacttctagggtacatgtgtgcaacgtgcaggttttttacatatgtatacatgtgccgtgttggtttgctgcacccattaactcatcatttacattaggtatttctcctaatgctatccctcccccctcctcccacccaacaacaggcccccatgaagctggaaaccatcattctgagcaaactatcgcaaggaccagaaaaccaaacactgcatgttctcactcataggtgggaattgaacaatgagaacacttggacacagggtgggggacatcacacacctgtacatttttaatacaatcatgtgttgtttaactacagggatacatctgagaagtgcactgttagagaattttgttgttgtgggagcatcatagagtacttacacaaagctagatggcatagcctactacatacctaggctatatggtatatcctgctgcttctaggctacaaacctggacagcatgtgacatactgaacagtgtaggcaactgtaacacaatgctcagtatctatatatctaaacacgtctaaacacaggaaaggaacagtaaaaatacggtaacagaatctcatggggccaggcgtggtggctcatacctgtaatcccagcactttgcgaggctgaggtgggtggatcacctgaggtcaggagttcaagaccagcctggccaacatggtgaaaccccatctctactaaaaatacaaaagttagctgggtgtggtggtgcatgcatgtaatcccagctactcaggatgctgaggcaggagaatcacttaaacctgggagatggaggttgcagtgagccaaaattgtgccactgcactccagcctgggtgacagagtgagactctgtctcaaaaaaataaataagaatcttatgggaccaccctggcatatgtggttcatctttgaccaaaacacgccattatgaagcatgtgattatattacatggtttagactctgggtgtggttagattccctggagagtattgatttttactttgtgttgtttgaacaatcaccaactcagttaggttcagactgctggctctgtcttgccttctgtggacaatgattctgatggctgtccagacagtggcagtgagaggggaagggacttggcctccccacggctcccagggctctttctaacacaagcaatttctccagtcttcagctttgcctctcaaagtctcactgccttctggccagcagtggaaatgcagaaagtgtacaaacaaagccactgaattgctggtcttgtgatgtttccttgtctatctccagcctctggaatccatgcagtaggtggtcagcatgaaggaaagggtcaaggtttctgtctctcttccttaatggaggagtgaatcaattcttggagaagtaataagagtgaatcacttcttgtctagaagccaacacattgaatacttcctataaattattacagtaagtgacatttagtcaaggaaaagccagcaattgctatggcctctaccactttcctcttatggattattttggggccagttgatataatcttgataaatattttcagaaaacttgtttccagttttgatcatttagaaacatttagtttctaaagttcaatatgttgtggttcaaacgattttttactatttgcttgttactagaaaaatagaaaagaaatgagtgaggctgggcatggtgtcttatgcctataatcccagtgctttgggaggctgaggtgggaggatcccttgagaccaggagttcgaggccaacctgggcaacatagtgagacccccagcatctcaacaacagcaacaacaaaaagaccttaatgagctttaaaagcatatactcaccttactcatctgtaaaggtttcaggtgtttgttttgcacgcgtgcttgtggatgaatacagttgacattactccaagaactcaggaaacattttatgagttccagtcctggctctccctcttgatagctgcatgacaaagatgtccttgggtttcagtttcctcatctgtgaaatgaaaacatagtaggcctccctggatggagtttgtctgaggatttgaagatccagtgcaggtaaagtggctagaatagtgtcattgttctgagagtttaaaagattttgtttttttgtccaggaattaacgattaatgcaaaaagagatcatagaaaaaaatggagagtagtaatttatgagaaatgtgaccaatttgttctttcctcttttgtctgaggtggttcatgttatgaaagatcgtctgttccttgggctcctcaaatcctttttccttctcgctttatgagcagaagcttgcttttcctattggagagagccagctggatcgtgggtccctcttttcatttaggctcttgtcccctactctttatgtttattaaggatttggggagggtggggaggaggagtgggataaacctctgaaaaaaaaatgcagggaccagtttccttatttttaaattatggtctttaaagaaaaatgtcctaaaatctaccactagcaattactttttcattttattttcagaaaacgggctactcccttggcaattggtcctaggtttcaaccctcctaagagatttccacagccccttttatacccaagggtggaattcccctcgaaggccagcacccctccctggcagcaaggatgagttgctcaagggagcctgtccaacttgctagtaacgacttttctgatgtcatcattccccagaagcagctgcgagccttttggggatgatttgtattaacactctggcccagaggtgaccgggctcactctgatgataacagttgcccgtggggttcaaggtgaaaatctcatccaggtctttagttgttttctgtttttctgattcatatacatttattgaggtttaacttacatccataaagtgtgtaaatcttaagtactcggctcaacagaattttacacacatgcacacccatgtagacacagtccagatccagatccagaacatctctaatccctggtgtcctgtcctggcccagatcctccccaagggggactgccatcatgacttctgtcccacaggttagttttgcctgcttttgaacttcatataaacgaaatgctgtaggagatactcttgtgtctgggttctttcacacagccttgcgttcatgagatgcatccatgttgttctggagcagtaatgtgagctttttcattgaataaatacattccattgtctgaatttcattgtagtattccattgaatgaatatatccaatgtattcatttctgtccaaatgggcctttgggttatttccagcttggggctattataaataacattactatggacattcatttacgtttctaattaatgactgacatggcctttgtcctcccgtggtgaccctattttaaccaagtagtggtcacttacaaccatgaatgtagctttcagaatgtttggatgagaggaataaactggcgagtatttataaagtgacttgaactttacaattaaaagattatttactttgaaaagctgtataaatggttatttaaaatagttgtgtggcttctatcaagccattagtcatctctgagcctcagtttccccatctgttaaacggacataatattagtattgtgcaaaaataatagaattattgcaaggattagatgatagtgaagtaaagcacttagatggaggctggcccatctgagcactcaatattaatttctgttattaattttttatcataatgatgatataaggtaaagtcaaagatgctatgaagttgcacgagcttattaacacaaagcaaccaatgtaaaccaagtaatttgttttaatgccagatgtgaataagttgttctgctttttttcctactttataacctccttcgcatcaaccttgatttctatagttatataaacctttgtatttaaacaaagagatctcctggataagttggaagaggagaaagaaaaaaacaacttgggctggggaatctgatgattgtggggtcagcgttaacttttggcctcagttttaaccttgggggactgttttcattgtttgtacctctgcgttagatttatctttgtccctggccttctaataataggtaatcatttgaattcaataagatctgatccagcgtcaggaattccaaaggccagagagacaactcaactatttcttttgctttttcttttgagacagagtctcattctgtcactcaggctggagtgcagtggcaggatctcggctcactgcaagctttgcctccagggttcaagagattctcatgccccagcctccagagtagttggtattacaggtgtgcgccacaacgccaagctaattttttgtatttttggtagtgatgggatttcgctgtgttggccaggctggtcttgaacccctggcctcaagtgatctgcccaccccagcctcccaaagtgctgggattacagtcatgagccgccatgcctggcctaacttaactatttctgatcttatatgtaagtggacccattggcttcccaaatggaataaaattaaggtgtcatcattttatgcgtagatgctgcagcagaacccaaggggctcagatgagaatgtgcaaacgtgtgaggtcaaaaagctgctattgacaaagcagaggagttattattatataaatagccttcagcccgcatctctggatttatggtactggtcattttagtattagccaagaaagctactccactgggaaaccattcaatgaaggagggaagaataacgcctcccacacccaaaggtgtttcctaactcggaacagaaacacatttcacacatttttaacttttaattttgaaatcatttcagatttccaggaaagttgcaaaaatatcataaagaaatatctacccttcactcagattcccaaatgttagcacttcgccacatctgcctcattcttctttctctctcttcacacacacacacacacacgcgtgcacacacacagatacatgcacgtacacatacatgcacacaaatacgtgcacacacactgtctctcattttttctgaaccatttaagttgcagacattatatccctttacccctaaatacttcaatgcatatttcctaaaaacaaggctattctgtttaataactacagtataattatcagacctagaaaattaacactgatgccttgttagcactattaccttatctgcaggctgtattcgatgccccactaatgtcctttatagcaaatgaagaattttttagtccagaatctgatccaagatcacatactatatttaggtggatctatttcctcagaaaacattctttttttttttttttttttgagatggagtatcactctgtcacccaggttggagtgcagtggcacaatcttggctcactgcaacctctgcctcttgggttcaaacaattctcctgcctcagcctccccagtagctgggactacaagcgtgcaccaccatgcccagctaatttttttgtatttttagtagagatggggtttcactatgttgatcaggctggtctccaactcttgacctcaaatgatctgcctgcctcagcctcccaaagtgctgggattacagatgtgagctaccacgcctggccctcagaaaatattctaagagatgttgaatgctcattattagaaaatccttcctttaagataacatctttgctctcctgttaattggatgaccagttgaaggactaggtcaaaagaatgtcttctagcatatttgcctgtacttacagggatagggcatgaaagtaattaaaacaaatatatttcattgtattgattatatgcaagttagacatcattggggaagattcggtcttcctggcttttcagagaaaaatgttaacatgtgagttatggcgctgcttggtgttgtctgttggttggatgttaaggtgtacaatttgtgtgcctgcaaccaatgcatagagttgcagatgtccattgtaagaaagcagatgttgcatttcttctttcttcagacaatagtcatagtagctacactttctttggcagatgtggtgctggaaaaagccatgcacaagtgcatcttgaagcccctcaaggggcacgtggaggccatgctgaaggactttcacatggccgatggctcatggaagcaactcaaggagaacctgcagcttgtgcggcagaggaatccgcaggagctgggggtcttcgccccgacccctgattttgtggatgtggagaaaatcaaagtcaagttcatgaccatgcagaagatgtattcgccggaaaagaaggtcatgctgctgctgcgggtctgcaagctcatttacacggtcatggagaacaactcaggtgaggccgctggaagcccaggcttcgtgccgcttcccttccgggccggggacaggcctctctcctgtcaggctttctgattcccaatttctcctccctttggtctcttgatttcaccaagtggcttacagaactacaagtgattctctgatatccggcacattagtcacatgcaacagattaaaatgtaagcagatgagggcaacaagatttttgtaccaggccgatttaattaaagatttagttcagagtatggttacaaattcagtctctggagtctgagttcaaatcttccctccgagaagaagaaaattaactgagggactttggcccccttaatcaaccttgcacgctgtagttttctgcgtctttagccggatgtcaccctttctttcatgaggtggggattagctgagacagcccacacatagccccaagtgcaatggaaatgtcagcgattatcattacaacattttggccaatgagggtttgtgtcaatgacctatagtatgtgaaagaaactctgaacattcagttataatgaggcctcattagagccgcttcattggctagcccttctttgctacaagctgaagcaatataattgaaattcaccgaagagttacaatcttggaaagccagccctcagatttagccttgttgtttcctgtagatgcaggggtaaccatgaatcctggatagtaatggagccctgcattgtcccaggtcttcagtaagcttattgtaattctgaagacgattacgaacttttcttctgagtgaaattgcttaatggagaagcagcagagagaaaacacaggctgtattaaccactgcttgagtagacaggaatgtgtgtgcactttgggaattgttgagtgaagaagttaaaatatgagctcctgggcgtggtaatgatagcaagtgaacatcacctcacaagtttgcaagcatatttcacatataggaaacatattttctatagttcacagttatttataaaaattccccaaataatatctgaatatctgaattccccaaataattcagaaggattatgctcttctgaagcacagttcctcaacacacacactaaagacattaatgtagacaggataattcttcttttgggggctgccctgcttcctgtaggaagtttagcagcattccagatgtcatctgcatccccaccctccagttatgtcaatgaaaaatgtcttcagacagtgccaaatgtcccctgggggacaaaattatctccagttgagaaccactgatgtaaagaaaactagaagtaaacactaacattttttgccatatatttccattaatcaatgtgtatattcaacatgtactgaattggcacgtttaaagaaattaactgtgtgctcacattaaatacagagcaaagttagcttattcctggtttgagtttgaccttgtcattatgtttgtaaataatgtgcacagcaagaaagaggaagtaagacacaaagaattagcataagtaaatattttgtaagcattttataatcttgtttgctgaaagttaaaatattttaacgagtattctgttctatcacataattttatacaaattataaaagtagggagaaaatctgtaatgtgttcattggttcatagacattcattctgaaactgtaagggctggtctctaacattagcagctgggagggtcagaggctacataggattccagaaacactcacctctgtttataaatagcacagttccccccagagtgactccttgctgtctaataaaagcagcaagaaggatgtgaaagaaagaaaagttggtaaaaatattccatctccttctcttcctgctctcagggaggatgtatggcgctgatgacttcttgccagtcctgacctatgtcatagcccagtgtgacatgcttgaattggacactgaaatcgagtacatgatggagctcctagacccatcgctgttacatggagaaggtaactgcttttgagaaaagttgaaggaactgggtgctatttttttcatttttttataattgagacgaaattcatgtcacataacattaatcattttacagtgaataattcagtggcatttagtatattcacaatgtcatgcattctccacctttatttagtgtcaaactattttcctcaccctaaaataaaattctgcacccatgaagcagttacttgggtgcttttttgacatcttaagtgttaactgaattttttattaatttaaaagagtgtactaacctttttctgattgcaaaagtaatacacactcgtggtagaaaatttggaaaagtcaggaaaaacacaaagaaaaaatataaccccatcttaactatacttcactaagattgcttaatggcaataaaaaaaatacattcagtagaataaatgccattttttttggaagaaatggtttctttggctccaagaggaaattataaacttttgttgaggatatttccattgccaggaaaataacctgctcttatattagtgaaatggataaaagcttggctttgtttttattttttaaaatttcgttttcaaggtgaaaacagtattaatttttttccagttttttttaagtatcttttcatttttatagtaaaaatacaggggtgtggaatctgtgcagtttgctctcaatttacgttggcattcgggttccttctccttgtgtctgcctaaccccaacatgtcttagcagaaattccttctccttacacatagcttaggtattttacatggaaatgattaggatgtttggcacagtagtgcacagccttgaaacgcagaaataactgggactctatgtgagcttatcttttcaaaggagaacaaatcagggcctgtgcactgtgaatcctcttaatccatttttatatatccagataaaagcccagacaagccctgggggggattgtcacggtttcgtttttttttttcccgtgagtttcagtctgggcttgagtagaaaggtccatctctgacaggattccctaaggaatgagtcatcccagcattttccctggagggaatgaaatgcatttttaccacccccagaatgtgcccccttagtctcctcagtcctgtaatgtgaattcaccaggccttaacttttcctgtcggagggaccgccctccttggagcccgattatgcccttcccacgtgaccatgggtagtgctgactcaggatgggggatgaatatctctcctcccgtacccgatcccaggcaggtatgaatgggcctctttcatgctttcaccctttagcctcttctgtccccttattaatattactaaccatggaaccagacactccccgatgagcctccaaggccctccctggagcttttcttgcctgctctgccctgggattagacaggacaaggccaaacatgtggttttgcccagggaccaagagaagcatgttagtctacatagcatgctttccttccttccactgtaatgtttgttattaatacagtttggggtttggttattctttttcgagcttcgatcatgtttaattctagtaatataagtatgtagagctcttagggctttggggaaaaagacacgccggtttcacttagaaagtcgattctgttgctgacaatgtgcactcaggacaaacattgcttgtatcttgtggctcaaggatagaaacagctacttcctgcccctttcccagattggcccagggcaaggccctgtgttgatgactaatggacaggtggctgtcttctcctccacgaatcccacaagaaagacaagggcacagctagtgaggatacaaaagctgctggtgagctcgcacttaaatagagcctgcttccacttaaccgtgtctggggcttcttggctgccttccttgggaagtaggcggcccagttgggttggctgtgatcacagaccaggcctgcacagcatcgaactgaagctatgcagcctgggaggaagaggctactgagcagtggcaaaaatacagattggacttttccgtgcctgcccaaagtcctctttggtttgcggggtagcagccacgtctgttttccgctgtttaagcaggtattctcatttaccaaaaaggcgtcatagaatcccttagaagtgcacagctcttgtggtagggttatagtcttgctgaaatttaaaaccttctctaattgcatccacatgtttcaaagtgtggtcaattttgtgcttccagcatttgagttttctccttagcgtcctgaacagatgagagctagggagtctaaaatttgaagtccaaaggagcccccctccacccccacaaagattgtaacagttctccgagtccttgctcaaatcctgaccctccatacggcctttcctgaatacttatgttcatattgatttctcctgaaattctccatgtagcatctgtattctggattactgagtttcacacacagtcacatgctgatttgtttgtggggcgaatatttggtaaagatcaacaattcaaaactcttaactagggtgattatactgtaggtggcaaggtctggaaaacccttcagatcactctatacacaaaaagcttgacatgtgatcaatggaaagtgcatggctcagggtgacccagattatgccgcgggaaaaaataacctcaagtcttcatctgcaacctgaaaacaagaagggtatttttctttctcgtgttcatgtccagcacgagtttgcagggcgtgtggctcctgatccacatggaggggacagttgccatcttgcatattgccacttattgaccagagagaggcttctgcagggtctcacatgaataaagctaaatactttggccctaaaggtgacacttctgcacaaaactcatttcgccaaactaacttctggtccctgcaggaataaattgccagtgtctgttttttttttaaaaaaaaaaaaaaaaaaaaaaaacacattcataaacttctggagagtggggactcagattctatttcttacaaacctactttcttctctgtagctgtggctcacagtagagattcaatgagtattttgacaaagaatgtctctaaatctaaaatatgctgtgcccaattagggaatttttaataaacattcagggcgacccctagtggctcttcagcgcagagaccataagttcctccccaggcacctaattatatgttaggacaaaaactatgaaggaatacatacacatcttacagtgtcgtcagccctttttacactcctcaagaacataagagatcattcctaaatacaccatcacaggaacatcactttcctgtaaattattttatcctaaatgccagatgttatgttagtcccaaaggaaggggggggtaagaaagggaatcaagggagagaaattatttttgaagtgtccacatttttgcgaacagttctttcaaagtgtatagtttacttaagatttagaaaatactcattgcgttttttcctttttacttttttttaaaccaaattcttgtttatcagagatagaaaatatcaatttctaaaagaaaaagccaagagcaagtgttgccacgagtctggactgatggaggggatactggccttggatcacctcacacgcctgactttccccccacctccccgtcaggccttaataccccaactactcctggcaaacatttttcataattgcactttaataatttcggctgggcatggtggtcatgcctgtaatcccagcactttgagaggccgagacaggtggatcagttgaggccagggttcaagaccagcctggccaatatggtgaaaccccatctctactaaaaatacaaaaattagccaggcgtggtggtgcatgcctttaatccgagccactcgggaggctgaggtgggagcgtcgcttgaacctgggaggcggaggttgcagtgagctgagattgtgccactgcactccagcctgggtgacaaagcaagacgccgtctcaaaaacaaacaaacaaaaaaacaaacaaacaaaaaaaacactttagtggcttggtcagtctcacgcactagaatggaaatcccatcattgaaaaacaggaaccttgtcagcctggcttgtctgtgcccccttggcccctcccaggcctgggtcgctccagaaatctctgtgggatggctgtgtgaagggatggatggaggagtgagtgccatgctcttgggtgtgtgcttctgtgatcccacaaggaaatgcatgttgaagaaatactaaaaatacaaaacatgccttctaacgctggcatcccctgttatcacccgtgagcggaggttggcactgggaggacccactctttctgctcttttcaggaggctattacttgacaagcgcatatggagcactttctctgataaagaatttccaagaagaacaagcagcgcgactgctcagctcagaaaccagagacaccctgaggcagtggcacaaacggagaaccaccaaccggaccatcccctctgtggacgacttccaggtgtgcagctggccacccctttgcttccttcgtcctccaggaatgcggagctggctcacccagcacatcccagctcagaggtccccactgtgttgaattatttggcaggaaagggatatctcaaaccaccctctggccttgttacactgatctgttttctttacatttatatacgcatgggatacttggcccaagttttgctgtctttaagaaaaccaagttgaattaaggcagaatctctgcccaatcaagcagacgataagtcaaaaaggaggaggaagcacttggcacagacgttggagattttgtttcatcaggaaacagccgctgtgttacgcgatgcaattggcctagtttctctttgggaagagggagaggaacagcgatgtctccttcccttttctctcgcccactctccaaaacagaagaccccagaatctcagcagcagcagcaacagctatggcagccgtccacggcgcagagtgaccaggcgagcatctgagcgagtcctgctcaggttccctggccagggcttttcctgaccgtgagctgctgcttgggaatgtgggactcccagtgagcttgtttcttagaatggacaggtgggttagggctatagaaatctttacccaaggccaggcatcagggctcacgcctgtaatcccagcactttgggaggccaaggtgggcagatcacctgaggtcaggaattcgagaccagcctggccaacacggtgaaaccctgtctctactaaaaatacaaaaattagctgggtgtagtggcaggcacctgtaatcccagctacttgggaggctgaggcaggagaatcgcttgaacccaggagatggaggttgcagtgagccgagatcacgccactgcactccagcctggacaacagagtgagacttagtctcaaaaaagaaacaaagaaatccttacccaacacaattcctgatttgctcattgtctatgaaataatgagtgagttggcaaatgtctgcaaataatattttgaaggttttaaattaaatgataaaaccttcctgtggtttgtttctatgttccccatgatgagtttccaagcagggatgtggaaagcaagacagatttgtctacacatccagattcacctgcttttttttttttcttaagacagagtctcgctctgtcacccaggctggagtgcagtggtggcacgatctctgctcactgcaacctccacctcccaggttcaaacgattctcctgcctcagcctccggagtagctgggactacaggtgctcaccaccacacctggctaatttattttgtatttttagtagagatgggatttcaccgtggtggccaggctggactcaaactcctggcctcaactgatccacccgcctcagcttcccaaagtgctgggattacaggcgtgagccactgcgcctggccattttttttttttataagagctctgaaaatagagggtcagatgaggtggctcatgcctgtaatcccagcaccttagaggctaaggcaggaagatcgcttgaggccaggagttggagaccagccttggcaacaaagtgagactccatctcgacaaaacaaccacaacaaaaaattttcaagttaggtaggcgtagtggtgcacacctgtagtcccagctactcaggaggctaaagtgggaggatccgttgagcccaggagtttgaggctacagtgagccatgatcacaccactgcactccagcctgggcagcagaatgagaccctgtatcaaaaacaaacaaacaaaaaggcaagcccatctttgaaagccaagatcagctcattcttctccatgattgcagtatgctcagaaattccttctggagcgcataaacctaaagagtgagaatacacgcactgcactctccccaccctgttgcactaagaaggtccctgtgccactcagtgcctgcagacccctggggtgccatcatatagccatccagggaggggctgcctagggcagaacagaggaagtgaaaaaagttcattgttcctttccccacctgccaacacaccctcctccacctcttcacctggagaccctcagacaccatagagctgccttcttctgcagccgtcccctcctgccctcattgaccctgctcaccttggaggtgcatgccttctcagagtgtaaccgaagaaggaaatgttcagcactcggctcaggggtcaaagcaaaacctcagacccaaagctccatctggaacccctaaatcagaggccacagacacagaggtcttctcacatgggaagaggtagtacgtcttggtggtaaaggcggtggggctgcatctgccacgtcctagctgtgtggctttgggcaagttacgtagcctctctgtgcctcagtttctgcactagtcaaacagggattatgtagaccctgtctcttaaaaaaaaaggttcaaagagtgtcactgtcaatctgggcacctcccactagctcacctctcctgcaaagtcactgggctagcaaaagtccccactggaagcagatatgaaacatatcttacatgtgcagagctcactgtccttcccaagagctttcccttctgttatcccaggaaaccctcgtggtgaccttgcaggcacctgggcagagagccctccttcccttcactgctgagcagggttgccagatttagcagaaaaaaatctatttgttttctagctgaaactcaaatttaactggctgttctagatttcatctgataactccactgttaaggaaacagaagcaaagttatctggggtcacaaaatctaggagagcctgatgtgagtttaagattctttatgcctggtctgggctttgtatcttgtaaggccacaggtttacatgtttcatgatagcatgtacctggcatgattgcagcacctgagcctgcaaacgtctttgtttaattccctgcagcaccaccttgcatgtaatcagctccatctgcaaagtatttggcaaaatcaacattcttctccttctgactttttccacattgtgcccagagccactaggagccttgtattagattgaactacatgaaatcaccatttgggggagataaaaaatagtcaaaagtcagcgcattttgtgtgtgtgtgattcaacctaaatgattgcccttgcttaggatttatttaaaaagtttgtcaaaagtgaacacaagccaggtacagtggcatgcacctgtacacctagctactcaggaggctgaggcagaaggatcacttgagcccagcggtatgagtccagcctggagaatatagtgagatctcatctcttaaaatgaaaagaagaaaacaaaaagtgagcacagtacgtgcttttgtgtctagatattttaaatctctttctgctgacttccttcatactcttgtgctatttggtttagttttcaagctgggtttggatgtggttcacactcttaagcaggggtttcttaaccagaccttatgagggaaatggaaagatcagaaccagggctgcatggacttcctgcttcttacagttgcaatgaatcatgtagtcatcttcgccactgtccaaagtcagatcagcctctttccttgccattcgaagcctcgtggcctgacatcggacattatgacaggaaagggcctggaaatggcttacagttaccccctcccctggtcccccatcatgctcactatctagttttctcttctgactgtctcaacattcctcttccacctgcagaattacctccgagttgcatttcaggaggtcaacagtggttgcacaggaaagaccctccttgtgagaccttacatcaccactgaggatgtgtgtcagatctgcgctgagaagttcaaggtgggggaccctgaggagtacagcctctttctcttcgttgacgagacatggcagcagctggcagaggacacttaccctcaaaaaatcaaggcggagctgcacagccgaccacagccccacatcttccactttgtctacaaacgcatcaagaacgatccttatggcatcattttccagaacggggaagaagacctcaccacctcctagaagacaggcgggacttcccagtggtgcatccaaaggggagctggaagccttgccttcccgcttctacatgcttgagcttgaaaagcagtcacctcctcggggacccctcagtgtagtgactaagccatccacaggccaactcggccaagggcaactttagccacgcaaggtagctgaggtttgtgaaacagtaggattctcttttggcaatggagaattgcatctgatggttcaagtgtcctgagattgtttgctacctacccccagtcaggttctaggttggcttacaggtatgtatatgtgcagaagaaacacttaagatacaagttcttttgaattcaacagcagatgcttgcgatgcagtgcgtcaggtgattctcactcctgtggatggcttcatccctgccttccttcctttctttttccttttttttttttttttttttttttacaaagagccttcatgtttttatatatttcatagaaatttttatagcagttgcaggtaaactgtcaggattggttttaaaatatttttgtaactttaaaatattctataattatgcatgtgattttaacatttaatattcaaaaataaatctcttgctggatttgagagtattgcatttttaaagtctctcttctgtaactggatgttttggcaactttgtggggagagactgctggatttcttaaagcaacgtattcctgacactggccacagaatgcctttggaaatcggatgtactgttctcttgttcacgtttagtggtgttttgctgttttgttttttaaacaaatgatgctgagaataaggagagaaatgaatgtagagagaggtagagagagaaatatgaactctaacaaaggactgaggagtgcagtctgctggttcaggctcttcaaaagatgtagaaaaagagatagaaggaaccacctatgcttaaaatactgtaaatatgcagtgaggtttggcaaaatctattccatgtgtgatttgcttgtagaaacaattttgaaagccccttgaggaaaataaaaatcaagaagaacacttttctcccttttccatacaaattaaaacttaacagcatcaaattattgggaccagaaaccaagtaatgtataatgtggcttttgttgagttaaataagatgctatataatggagaagaatttgaaaatgcacaaaaaaatcaatctacattatcagaacctgcagtgaaattaaacttatgttaaataaaaccagtttgcaggtgcacaaactatgagggtcttgtatccacgtaacacaggtagttacaaaaacatgttattgtactgtgtaaagatgcatagtcatctcatttggttggctttgtaccttgtaccttttttagccttggcttttgttgaactagaaccctcagcacatactgtgttgtacttttgtaaatgattttttaaatggaattttgcacataatacattgtaatactgtatgataatcatgtgtgaaaataatttttgaaatatcctttggctgtttttttttttctttagagtaagaatatattcatgcaccacgcagtgtcatggacagatgaaatccgaaccagggtttgtggttagacaatgtatcgtgggggtgagcagaaaagctcacatttctcagaagctcctcctgatatggggcaaaagttaaggagcagaaggaaaagatcatcctcccacctgaaagtgttttcattgttatctagtgctgtacttggctcagtgggacttagagcaaatcacaggtaatttgaacccggagttagctggggtcctgcagacagccccaccctgtcctcacgtaacctctgcaatgccctgggtgacagttcagtgctgttgcaaaattgatagcgcagaggcttggactcctcgctgccatactccccatgcttggaagggtgcctggcatatattaatagtaagtgctcaataaatccttgctggctgaaggaaggaaaacatgagtttagaagggtttctaactcatcagtgggagagatccgtaaagatcagaatgagaattgaatgggctgcctgcttttgatatttacaacggaccaaaagatgacagctcaatccatatggttgtcctcccaactcttcaaactaagatcatcatgctttgttgatttaaagcaggtcacagcctctggatgcgaggcagccttgcagccttcggtgggacgagagcgggctcagaagaggaaaaggtagcgtgggcagaaagcaacatcacaagacggtccctggttttgtcattgggcaatgtttccccgttaaaattacaacacaacatgtgcctccactttttcccccacgcaggcatttctcacttctcaaattgccaggaaacagacttgggtgaaggttggagggaataagaggagagtaaaaatatacatgctgggtggaggaagaggagaacgcatttccaaatttaaaaatacattatagctgaggtgggaggatcgcttgatcccaggagtttgagggtgcggggagctatgatcccgccactgcgttgcagcctggacgacagagcaaccctgtcttccccctacaaaaaagtaaaaataaaaacatgttataaaagttgaacgccggccaaaggaagggatttttttttttttttatgttgcatgcgctgccaaatactttcactctagtaccacccccacacccccgggacacagaatagaaatagaaactgttgaagtagttcatattatgtggaggttacaacttcagatctataagaaaatacaaaggacaggaaacccagctatgaatgcttccattcacaaatgcggttccgtcctcattgggcagctgttaccttcatcttctttaagagacttgaaatgaggcagcgctccaatctttaacgcctgctcatgccgtcatgcctggtcacacctagtcactcctggtctcctaccagcagtctcagagaaacagaaacagcacaagaaggactccgaagggcacagtgtgtgtggaacacaggcattttaatcatctggcagtatctgatagtaaaattctaagtgtcctcattttttcggcccattttcatgatggtgaatttgagaccaaaagtactttttgtcatttggttaactctaattcagttggaaatatgggaaagaaatcgcctaacattgcaaaatcctaaatacgtgataaggaaaggaaggaaagaaggcagagaggggccaggcgcggtggctcatgcctgtaatcccagtactttgggaggccaaggtgggtgaatcacttgaggtcaggagttcaagactagcctggccaacatgtgaaaccccatctctactaaaaatacaaaaattagccgggcatggtggcaggcacctgtaatcccagctactcgggaagctgaggcaggagaatcccttgaagccaggaggcggaggttgcagagagctgagatgaggacactgcactctagcctgggcaatagagcaagactcagtctcaaaaagaaaaaaaagaaaaaaaaagaaggcagagagggagggaggaggaaaacatctggcatttgtctcaagaaacaggttctgattagaaaaagatcgattttactccaacatcaaaaatggtggcagttggcacaaacctttcccccatgaatactagctttggaagaaatgtaggtatgggaagttaaaaatatatataattattctgaaaggtctgggcatgtaacctttttttttttttttttttttttgagacaaggtgtgactgtcactcaggctgaaatgaaatgcagtggtgctatctcggctcactgcagcctcaacctcctgggctcaagcacaatcctcctacctcggcctcctgactagctaggactacaggtgtgcaccaccatgcccagctaatttgtgtttattttttgtagaggtgaggtctcactatgttgcccaggctagtctcaaactcctgaactcaagggatctacccccctcagcttcccaaatttctgagaaagtgtaaccaaggcctcccctcagaagtctccctggagaagcttcagttggagtgaggtggttgggggtggagatgggggcagagtttcttatctcgagtctgctataaattctcccatttaaaagtaaaatttgcctgaactctgaggctgcatgtaagacacttagactatcattacattaatgaatctgagtatttcctttgagtgcacacattagaactactacagccagccctcatttctcactgctggggaacgggggtggtcagatcctgccacctgtggagaggggctcagaacctgaggaccacgggtggccagggaggagctcctagacggccttcacctctgtaaccagccttcggtttcctgggggaaatatcactacacataattagctccattgcttccctttcttcccatttccccaccatgattctgtgggctgggttttccctcacgtagtaggtttgagggtgctcttaactctattccaagcctccttgccaaaaagcaggctctgatccttttcacagtttgtttcttcagttccaaccagagactcaaaaagtgtgaacccggccccactgcaaacattacccgcccacactatctgtcaccaagacccagtgtccgttgttccatttgaataggtggctctcagctttggctgtcagcttgaagtcacccggagccttttaaaactcccaatgccccagctgcccagaccatcagaatctctgcagaggcgacccagccagccatatttattttaaacttccaaggtgcttctgctgtgaaaactactagtttagatcaaaatctggattttaatataaaaacacacctgcgagaagtaacacctttgcctaaccaagaccactgacacctaaccaagcatgcattctcaacctgatttggctggcagaggaccatggaacatgtacttctagcctggtgctatcccgtagaaatacgaagcaagccacataataggtaattttacatttactagtggccacatttttaaaaatcaagaagaaatatgtagaatcaattttagtaattttatttagctcatgatatctcaaatatatttcaacaaccaatcaattaaaaatattaaagaggcattttacatttttttattttttatattgtcttcaaagtcttgtgtgcattttgcacctacagcacatctcatttcacactggccatgtcttaaataaccaatagccacatgtggctggtggctaccatattggagagtgcagttctagcatatcaactaggaatgatcttaaaagttaaaaaaaaaaaaacggtatgtgtatataaaataaaacacattcacaggttacatctacaaaggaacagacacatgcatcctgtcaaacgtatgtacctattactagccaaggatgaaaatagcatcttgcctcttcaggcactgctgtaaggcaaacataaattgatccatgcaaagtgcttagaacatccaggcaccacaccacaagcactgttaaatgttacttattatgattattagataatcgactgctttggcatttcacccctactgcttatttctgcttacccattcatgctattatctgctggcaagtttcttgtgaaacagaagaaaggcagtaatgggtatcaaaggtttaagaaaaatgtactggggcgggttgctcaatgtaggaagatcaaacataaagtgaatactagtcattaattttattttatttatttatttatttttgagacggagtctcactctgtcgcccaggctggagtgcagtggcacgatctcggctcactgcaagctccgcctcccaggttcatgccattctcctgcctcagcctcctgagtagctgggactgcaggtgcccgccaccatgcccggctaattttttatatttttagtagagatggtgtttcaccgtgttagccaggatggtctcgatctcctgacctcgtgatccacccgccttggcctcccaaagtgctgggattacaggcgtgagccaccgcacctggcctaactttattgttgttactgctgacggtggtgatggcggtgatggtggtgtgtgcgtgtgagttgggagtagctcattttccccagtattcaatgctggtcaagagcatcatcagggcccatagccaggggtgactttcgccaagaagggagaagggagcaagggaggttgcaaagacgtcttgctagcttcccagtcacgggcagatcgaaatcctaagaggaaccatctctgcctgcacaagagtctaaaatagtatttcccaaaaaggaattattatttaagtaaaagcataattatagtcagtgattattttaaccactttcctccacctttttccccttttactttattatattcacgaatttatatgtccatttatatcatttaacaggactattgtttaaaacttggtgctttaccaagaagaatacagaggttgacgtgattaattctttttatttctgatgtgcgtgcttccgatttctcaccacttctacaaattatgagagaatgcatttatttaccagattgcagtttccgtccattttatctttctcactcccatttttctctgcagcctattgatgtacgatcatatgcagaaaagacttatgcatctattatctactgaaagaaaaactacagaaaacaataaaatgctagagactctttaaccaatcagaaaaaaatacgtaagtgaagcagctacgacatcacaaagcttctatttttcgctagcacatgaaaatatgagacctgacaaattgcaaactctcattgaacagatagtttagggttttgccttgaaaaccatagtccacggatcaagcatcacatcttttgggagtttgtgagaatctcagacccctggcagacctgctggatcagaatctgcattttaacaagattcacgagcacattagagttggcttgagaagcattagttcaaggtatatttggggccttggcatttgtgcagctgatacaaatacacaaatgtaggaggtgtgctgctcttagaaccctgcaggaaaggagaagaaaatagctcataattgttttgctaagagtaaggcataacttcatttaaaatcacctacattatggacaaaaggcttaacaaacaaatgtcaggaaccaagtttttacctcattatatatattcaattatgttcttcttgctttgacagggaaaaggggcttgaagggcatggggaaaagattctgaaaattaggtgggattgctgaagtcaaacttaatgattttgctgagtttgctggagagtggcttctctcacctccaacatctgtatgagggcaaacaggagcagcggagggggatctctctgtccgggccagctgcttgcacatgcatgtgtgtgcacgcacggatgtcgtcatgtagtctgcacaattagtcacattgtctgcatgtgacatgggaagtttataagcttttttattttcttaaagaacagctggtccggccacagtggctcacgcctgtaatcccagcactttgggaggccgaggtgggcagatcacctgaggtcgggagtttgagaccagcctgaccaacatggagaaaccccatctctactagaaatacaaaattagccaggtgtggtggcgcacgcctgtaatcccagctactcaggaggctgaggcaggagaatggcttgaacccaggaagggaaggttgtgatgagccgagactgtgtcgttgcactccagcctgggcaacaagagtgaaactctgtctcaaaaaaaagaagaagaagaacagccaacttccttttaaaggcatttcattccctgagaatctactaatcataagacccttttactcaccaacttcgaaaaacaaagatgtgtttaataaaacctcttcggtgagcaaggagtggatgatttaaaacatcgctggaaaaagctcctgtggaatccccagcagacaatttcaaagggaaagtatggtgaatttcgcagaactctttcatttctccaggtaaccattgtggacaatcctgagccctcatttgtttttccagatgacactggtttactcacatgattttgccttatgtttttcaaggggaaggaggattttaaaagaataaacacaatacatggttttcaaaatcaaatattggaagacttgcaatggaaggcagcagcccctgagcctcctcccaatcccatttctgttatctcctcccctaaactacgtctccagctgtgtattcattatttatctccatacttctaaaaagatgctgatactgctgcttattggtttctttttcttttctttctttcttttttttttttttggagacagagtctcactctgtcccccaggctggagtgcagcggcacgatctcagctaactgcaaaccacctcccaggttcaagcaattctcctgcctcagcctcctgagtagctgggattacaggcatgtgccaccacacccggctaatttttatatttttagtagagaaggggtttcaccatgttggccaggctagtcttgaactcctgacctgaagtaattcacccacctctgcctcccaaagtgctgggattacaggcgtgagctaccatgcccggcctctttttcaatattagacattaataattgattccatatcatggaaggtgaggattgaaccttcttgtatggtggtcctctccttagggtgaccatgtagcagcctggtcatatgtcaatgcctgtggggcttttctcctgggtcaggtggtttccccacaagaaaattctccagtatcctacgggcgccgggtgcaaagtggggttaaattttgttgccagcgttctaggagctaagcaggcaaggagcctgtgggttttcagctttccgtctgccagctttcacctcctcccatttccaatgcagtgtctcaacgtcacttttcgctgcctgtgctctgacggctcagggacatggcttctgggtctctccaggagtgaggcgctcatcttctcccttcactcacacctgccagagctcattcctgagcccgctcagacgctgcatagggaatcgattgccttgcttcctgctggcttttccgcctgacattggttaacatctagctttctcctgtctgctgagttttcaagcccgcaaaattttgttaccagttcccattggctgctgtctcctcttccattctttttgttcctatggatgtatgcccttttaaaaattcctttttaaattttctttaattctcattttagtgaggtattggtaggggaaagataggtaatgcagcctgccttgtttaattgaaacctgtagttttaataagaaaaaaaataaataataaaataataaagaaagaaacctgtagttttacatttgaatggtgaatgaacttatacatcctagttagcaaaactgaaaatagattattacaatgataggccagagtcaatgcatctatcttatccagttattattttatataaaaaatttcttatatgaagtcatccaaacatccaagctgtttaattgtaaagtatgctgcctaggatatatcaaaatatatatttactgtgcactttgtcctttccatataatctgaaagaaaagaaacagagcaacaacagatgaaccatcaagctgtttgcttgttttcaatgtggaattttgcaatgatggatgtgaatctgggtcagcactgtttacagagagcacatggtgttttgtttcaatgagcaggaaaatgtttgccattaaatgtggtaaaagcttgtagttttttccaactaagcagtaaaagaaattactctgtgtagaatgataaataaagagttctatgagtcatctttaatgtaggggaaaatgtgcagccgggatagaaacagtgttttactgccggctaaaaataaaatcaaatgcactgaaacagaagtcaataacagcatgtcctagaagcccaagtaactgtggggtttaacgtagttcatgcttttcaaatatacttcttaaaatgatggtgacaaaaatggaaagactatgctgatccttccttctttccttccttccttccttctgtcccctcccctcccctcccaccattatttatctccatacttctaaaaatatgctgatactgctgcttattggtttcttttcctttttcttttcttttttctttttttgagacggtgtctcactgtgttgcccaggctagagtgcagtggcacaatctcagctttccttctccctttctcccctcccctctcttcccttcccttcctttcttttttaaaaacaccatgctggagtgcagtggtgcaatcatggctcactggagcctcaaactcctgggttcaagggatccccctggccttaccctcctaagtagctgggactacagacacataccaccatgcctggctatttcttcttcttttccttctccttctccttcttcttcttcttccttttttttttttttttttttgtttttgtttttttgtaaagatggggtctcgctttgttgcccaggctggtctccaactcctcaagcagtcctcccaccatagcctcccaaagtgctggtgattcttctgtttaaagtcagatttattaaggtgtaagtttgataaagtaaaattgactcatattagtacacatttgatgtattttgacagactcatttggtcatgtagccaccaccatgatcagtcccagcctgggcaaacattggtctgttttcttctgttcctataattctgccctttcagaatgtcatataaatggctgggcacattcactcatgcctgtaatcccagcattttggaagactgaggtggatggatcacctgaggccaggagtttgagaccagcctaggcaatatgtcaaaaccccatctctactaaaaatataaaaattagccaggtgtggtggtacacacctatagccccagctactcgggaggctgaggcaggagaatcgcttgaacctgggaggtggaggttgcagtgagccgagatggtgccacttcactccagcctgggcaacagagtgagaccctgtctcaaaaaaaaaaaaaaaaaaaaaaaaagaatgtccatgtaaatggaatcacagggtacacagacttttgattccggcttaaatattcatacagatgttttgataaaaacgtaacttttcgtttccctggggtaaatgcccaggaatgcaattgctgggttaagtgatagttgcatgtttgcatgttcaatttgtaaagaaactaccaaactgttttccagaggggctgcaccattttatattcccatcagctatgtatgagtgattctgttttgaagtttttagtacatttcagtgttaaactgctgaaattgtcagattcactaggtttaaaacacatgcactgt

SEQ ID NO: 1496 - DNA, 4758 bp, Homo sapiens
agccagcctccagcggtctcacatagcaggcaggcagtgcagcctggagcccagccaggggacgcaggaatcctttctgctttttaaggacagactttgctttaccacagcagtcgctcttggggccacacggaaagccaccactgagtttactataaagtgacagaggctggtgtctctaggagaatgaggaatagtcacttcctgcctttgtccattagcgccgaccaacgcgaccagctccgtttacattctttcagtggtgttgttgaaagggcttggcagctcccaaatgtttgcagtgtccttagtcctatgagggctgccttcttcttcttcttcttctttttttttttttttttttgctagcttttagctagtatctggaaacatctactggacatgttggactcattttctcaagaatccactttacccttcagggaagccaggaaaagaacaagcttccaaccggtacaagtctggaggaatttcacagcctctcaaactacggagtccccggcgtgcagtggagcctcgctgggggaaatgacagcttggaccatgggcgcccgcggtctggacaagcgaggaagtttctttaagctcattgacacaattgcctcggagatcggagaactgaaacaggagatggtgcggacagatgtcaacctggaaaatggcctggaacccgctgaaacccacagcatggtaagacacaaggatggtggctattccgaggaagaggacgtgaagacctgtgcccgggactcaggctatgacagcctctccaacaggctcagcatcttggaccggctcctccacacccaccccatatggctgcagctgagtctgagtgaggaggaggcagcagaggtcctgcaggcccagcctccggggatcttcctggttcataaatctaccaagatgcagaagaaagtcctctccctccgcctgccctgtgaatttggggccccactcaaggaatttgccataaaggaaagcacatacaccttttccctggaaggctcaggaatcagtttcgcagatttattccggctcattgctttctactgcatcagcagggatgttctaccatttaccttgaagttgccttatgccatttcaacagccaagtcggaggctcagcttgaagaactggcccagatgggactaaatttctggagctccccagctgacagcaaacccccgaaccttccacctccccataggcctctttcctccgacggtgtctgtcctgcctccctgcgtcagctctgccttataaatggagtgcattctatcaaaaccaggacgccttcagagctggagtgcagccagaccaacggggccctgtgctttattaatccccttttcttgaaagtgcacagccaggacctcagtggaggcctgaaacggccgagcacaaggactcccaacgcgaatggcacggagcggactcggtcccccccacccaggcccccgccacccgctattaatagtctccacacaagccctcggctggccaggactgaaacccagacgagcatgccagaaacagtcaaccataacaaacatgggaacgtagctctgcctggaacgaaaccaactcccatccctccaccccggctgaagaagcaggcttcttttctggaagcagagggcggtgcaaagaccttgagcggcggccggccgggcgcaggcccggagctggagctgggcacagctggcagcccaggtggggccccgcctgaggccgccccgggggattgcacaagggccccgccgcccagctctgaatcacggcccccgtgccatggaggccggcagcggctgagcgacatgagcatttctacttcctcctccgactcgctggagttcgaccggagcatgcctctgtttggctacgaggcggacaccaacagcagcctggaggactacgagggggaaagtgaccaagagaccatggcgccccccatcaagtccaaaaagaaaaggagcagctccttcgtgctgcccaagctcgtcaagtcccagctgcagaaggtgagcggggtgttcagctccttcatgaccccggagaagcggatggtccgcaggatcgccgagctttcccgggacaaatgcacctacttcgggtgcttagtgcaggactacgtgagcttcctgcaggagaacaaggagtgccacgtgtccagcaccgacatgctgcagaccatccggcagttcatgacccaggtcaagaactatttgtctcagagctcggagctggacccccccatcgagtcgctgatccctgaagaccaaatagatgtggtgctggaaaaagccatgcacaagtgcatcttgaagcccctcaaggggcacgtggaggccatgctgaaggactttcacatggccgatggctcatggaagcaactcaaggagaacctgcagcttgtgcggcagaggaatccgcaggagctgggggtcttcgccccgacccctgattttgtggatgtggagaaaatcaaagtcaagttcatgaccatgcagaagatgtattcgccggaaaagaaggtcatgctgctgctgcgggtctgcaagctcatttacacggtcatggagaacaactcagggaggatgtatggcgctgatgacttcttgccagtcctgacctatgtcatagcccagtgtgacatgcttgaattggacactgaaatcgagtacatgatggagctcctagacccatcgctgttacatggagaaggaggctattacttgacaagcgcatatggagcactttctctgataaagaatttccaagaagaacaagcagcgcgactgctcagctcagaaaccagagacaccctgaggcagtggcacaaacggagaaccaccaaccggaccatcccctctgtggacgacttccagaattacctccgagttgcatttcaggaggtcaacagtggttgcacaggaaagaccctccttgtgagaccttacatcaccactgaggatgtgtgtcagatctgcgctgagaagttcaaggtgggggaccctgaggagtacagcctctttctcttcgttgacgagacatggcagcagctggcagaggacacttaccctcaaaaaatcaaggcggagctgcacagccgaccacagccccacatcttccactttgtctacaaacgcatcaagaacgatccttatggcatcattttccagaacggggaagaagacctcaccacctcctagaagacaggcgggacttcccagtggtgcatccaaaggggagctggaagccttgccttcccgcttctacatgcttgagcttgaaaagcagtcacctcctcggggacccctcagtgtagtgactaagccatccacaggccaactcggccaagggcaactttagccacgcaaggtagctgaggtttgtgaaacagtaggattctcttttggcaatggagaattgcatctgatggttcaagtgtcctgagattgtttgctacctacccccagtcaggttctaggttggcttacaggtatgtatatgtgcagaagaaacacttaagatacaagttcttttgaattcaacagcagatgcttgcgatgcagtgcgtcaggtgattctcactcctgtggatggcttcatccctgccttccttcctttctttttccttttttttttttttttttttttttacaaagagccttcatgtttttatatatttcatagaaatttttatagcagttgcaggtaaactgtcaggattggttttaaaatatttttgtaactttaaaatattctataattatgcatgtgattttaacatttaatattcaaaaataaatctcttgctggatttgagagtattgcatttttaaagtctctcttctgtaactggatgttttggcaactttgtggggagagactgctggatttcttaaagcaacgtattcctgacactggccacagaatgcctttggaaatcggatgtactgttctcttgttcacgtttagtggtgttttgctgttttgttttttaaacaaatgatgctgagaataaggagagaaatgaatgtagagagaggtagagagagaaatatgaactctaacaaaggactgaggagtgcagtctgctggttcaggctcttcaaaagatgtagaaaaagagatagaaggaaccacctatgcttaaaatactgtaaatatgcagtgaggtttggcaaaatctattccatgtgtgatttgcttgtagaaacaattttgaaagccccttgaggaaaataaaaatcaagaagaacacttttctcccttttccatacaaattaaaacttaacagcatcaaattattgggaccagaaaccaagtaatgtataatgtggcttttgttgagttaaataagatgctatataatggagaagaatttgaaaatgcacaaaaaaatcaatctacattatcagaacctgcagtgaaattaaacttatgttaaataaaaccagtttgcaggtgcacaaactatgagggtcttgtatccacgtaacacaggtagttacaaaaacatgttattgtactgtgtaaagatgcatagtcatctcatttggttggctttgtaccttgtaccttttttagccttggcttttgttgaactagaaccctcagcacatactgtgttgtacttttgtaaatgattttttaaatggaattttgcacataatacattgtaatactgtatgataatcatgtgtgaaaataatttttgaaatatcctt

SEQ ID NO: 1497 - protein, 938 aa, Homo sapiens
MLDSFSQESTLPFREARKRTSFQPVQVWRNFTASQTTESPACSGASLGEMTAWTMGRLDKRGSFFKLIDTIASEIGELKQEMVRTDVNLENGLEPAETHSMVRHKDGGYSEEEDVKTCARDSGYDSLSNRLSILDRLLHTHPIWLQLSLSEEEAAEVLQAQPPGIFLVHKSTKMQKKVLSLRLPCEFGAPLKEFAIKESTYTFSLEGSGISFADLFRLIAFYCISRDVLPFTLKLPYAISTAKSEAQLEELAQMQFWSSPADSKPPNLPPPHRPLSSDGVCPASLRQLCLINGVHSIKTRTPSELECSQTNGALCFINPLFLKVHSQDLSGGLKRPSTRTPNANGTERTRSPPPRPPPPAINSLHTSPRLARTETQTSMPETVNHNKHGNVPGTKPTPIPPPRLKKQASFLEAEGGAKTLSGGRPGAGPELELGTAGSPGGAPPEAAPGDCTRAPPPSSESRPPCHGGRQRLSDMSISTSSSDSLEFDRSMPLFGYEADTNSSLEDYEGESDQETMAPPIKSKKKRSSSFVLPKLVKSQLQKVSGVFSSFMTPEKRMVRRIAELSRDKCTYFGCLVQDYVSFLQENKECHVSSTDMLQTIRQFMTQVKNYLSQSSELDPPIESLIPEDQIDVVLEKAMHKCILKPLKGHVEAMLKDFHMADGSWKQLKENLQLVRQRNPQELGVFAPTPDFVDVEKIKVKFMTMQKMYSPEKKVMLLLRVCKLIYTVMENNSGRMYGADDFLPVLTYVIAQCDMLELDTEIEYMMELLDPSLLHGEGGYYLTSAYGALSLIKNFQEEQAARLLSSETRDTLRQWHKRRTTNRTIPSVDDFQNYLRVAFQEVNSGCTGKTLLVRPYITTEDVCQICAEKFKVGDPEEYSLFLFVDETWQQLAEDTYPQKIKAELHSRPQPHIFHFVYKRIKNDPYGIIFQNGEEDLTTS

SEQ ID NO: 1498 - DNA, 4245 bp, Homo sapiens
gagtccccggcgtgcagtggagcctcgctgggggaaatgacagcttggaccatgggcgcccgcggtctggacaagcgaggaagtttctttaagctcattgacacaattgcctcggagatcggagaactgaaacaggagatggtgcggacagatgtcaacctggaaaatggcctggaacccgctgaaacccacagcatggtaagacacaaggatggtggctattccgaggaagaggacgtgaagacctgtgcccgggactcaggctatgacagcctctccaacaggctcagcatcttggaccggctcctccacacccaccccatatggctgcagctgagtctgagtgaggaggaggcagcagaggtcctgcaggcccagcctccggggatcttcctggttcataaatctaccaagatgcagaagaaagtcctctccctccgcctgccctgtgaatttggggccccactcaaggaatttgccataaaggaaagcacatacaccttttccctggaaggctcaggaatcagtttcgcagatttattccggctcattgctttctactgcatcagcagggatgttctaccatttaccttgaagttgccttatgccatttcaacagccaagtcggaggctcagcttgaagaactggcccagatgggactaaatttctggagctccccagctgacagcaaacccccgaaccttccacctccccataggcctctttcctccgacggtgtctgtcctgcctccctgcgtcagctctgccttataaatggagtgcattctatcaaaaccaggacgccttcagagctggagtgcagccagaccaacggggccctgtgctttattaatccccttttcttgaaagtgcacagccaggacctcagtggaggcctgaaacggccgagcacaaggactcccaacgcgaatggcacggagcggactcggtcccccccacccaggcccccgccacccgctattaatagtctccacacaagccctcggctggccaggactgaaacccagacgagcatgccagaaacagtcaaccataacaaacatgggaacgtagctctgcctggaacgaaaccaactcccatccctccaccccggctgaagaagcaggcttcttttctggaagcagagggcggtgcaaagaccttgagcggcggccggccgggcgcaggcccggagctggagctgggcacagctggcagcccaggtggggccccgcctgaggccgccccgggggattgcacaagggccccgccgcccagctctgaatcacggcccccgtgccatggaggccggcagcggctgagcgacatgagcatttctacttcctcctccgactcgctggagttcgaccggagcatgcctctgtttggctacgaggcggacaccaacagcagcctggaggactacgagggggaaagtgaccaagagaccatggcgccccccatcaagtccaaaaagaaaaggagcagctccttcgtgctgcccaagctcgtcaagtcccagctgcagaaggtgagcggggtgttcagctccttcatgaccccggagaagcggatggtccgcaggatcgccgagctttcccgggacaaatgcacctacttcgggtgcttagtgcaggactacgtgagcttcctgcaggagaacaaggagtgccacgtgtccagcaccgacatgctgcagaccatccggcagttcatgacccaggtcaagaactatttgtctcagagctcggagctggacccccccatcgagtcgctgatccctgaagaccaaatagatgtggtgctggaaaaagccatgcacaagtgcatcttgaagcccctcaaggggcacgtggaggccatgctgaaggactttcacatggccgatggctcatggaagcaactcaaggagaacctgcagcttgtgcggcagaggaatccgcaggagctgggggtcttcgccccgacccctgattttgtggatgtggagaaaatcaaagtcaagttcatgaccatgcagaagatgtattcgccggaaaagaaggtcatgctgctgctgcgggtctgcaagctcatttacacggtcatggagaacaactcagggaggatgtatggcgctgatgacttcttgccagtcctgacctatgtcatagcccagtgtgacatgcttgaattggacactgaaatcgagtacatgatggagctcctagacccatcgctgttacatggagaaggaggctattacttgacaagcgcatatggagcactttctctgataaagaatttccaagaagaacaagcagcgcgactgctcagctcagaaaccagagacaccctgaggcagtggcacaaacggagaaccaccaaccggaccatcccctctgtggacgacttccagaattacctccgagttgcatttcaggaggtcaacagtggttgcacaggaaagaccctccttgtgagaccttacatcaccactgaggatgtgtgtcagatctgcgctgagaagttcaaggtgggggaccctgaggagtacagcctctttctcttcgttgacgagacatggcagcagctggcagaggacacttaccctcaaaaaatcaaggcggagctgcacagccgaccacagccccacatcttccactttgtctacaaacgcatcaagaacgatccttatggcatcattttccagaacggggaagaagacctcaccacctcctagaagacaggcgggacttcccagtggtgcatccaaaggggagctggaagccttgccttcccgcttctacatgcttgagcttgaaaagcagtcacctcctcggggacccctcagtgtagtgactaagccatccacaggccaactcggccaagggcaactttagccacgcaaggtagctgaggtttgtgaaacagtaggattctcttttggcaatggagaattgcatctgatggttcaagtgtcctgagattgtttgctacctacccccagtcaggttctaggttggcttacaggtatgtatatgtgcagaagaaacacttaagatacaagttcttttgaattcaacagcagatgcttgcgatgcagtgcgtcaggtgattctcactcctgtggatggcttcatccctgccttccttcctttctttttccttttttttttttttttttttttttacaaagagccttcatgtttttatatatttcatagaaatttttatagcagttgcaggtaaactgtcaggattggttttaaaatatttttgtaactttaaaatattctataattatgcatgtgattttaacatttaatattcaaaaataaatctcttgctggatttgagagtattgcatttttaaagtctctcttctgtaactggatgttttggcaactttgtggggagagactgctggatttcttaaagcaacgtattcctgacactggccacagaatgcctttggaaatcggatgtactgttctcttgttcacgtttagtggtgttttgctgttttgttttttaaacaaatgatgctgagaataaggagagaaatgaatgtagagagaggtagagagagaaatatgaactctaacaaaggactgaggagtgcagtctgctggttcaggctcttcaaaagatgtagaaaaagagatagaaggaaccacctatgcttaaaatactgtaaatatgcagtgaggtttggcaaaatctattccatgtgtgatttgcttgtagaaacaattttgaaagccccttgaggaaaataaaaatcaagaagaacacttttctcccttttccatacaaattaaaacttaacagcatcaaattattgggaccagaaaccaagtaatgtataatgtggcttttgttgagttaaataagatgctatataatggagaagaatttgaaaatgcacaaaaaaatcaatctacattatcagaacctgcagtgaaattaaacttatgttaaataaaaccagtttgcaggtgcacaaactatgagggtcttgtatccacgtaacacaggtagttacaaaaacatgttattgtactgtgtaaagatgcatagtcatctcatttggttggctttgtaccttgtaccttttttagccttggcttttgttgaactagaaccctcagcacatactgtgttgtacttttgtaaatgattttttaaatggaattttgcacataatacattgtaatactgtatgataatcatgtgtgaaaataatttttgaaatatcctt

SEQ ID NO: 1499 - protein, 889 aa, Homo sapiens
MTAWTMGRLDKRGSFFKLIDTIASEIGELKQEMVRTDVNLENGLEPAETHSMVRHKDGGYSEEEDVKTCARDSGYDSLSNRLSILDRLLHTHPIWLQLSLSEEEAAEVLQAQPPGIFLVHKSTKMQKKVLSLRLPCEFGAPLKEFAIKESTYTFSLEGSGISFADLFRLIAFYCISRDVLPFTLKLPYAISTAKSEAQLEELAQMQFWSSPADSKPPNLPPPHRPLSSDGVCPASLRQLCLINGVHSIKTRTPSELECSQTNGALCFINPLFLKVHSQDLSGGLKRPSTRTPNANGTERTRSPPPRPPPPAINSLHTSPRLARTETQTSMPETVNHNKHGNVPGTKPTPIPPPRLKKQASFLEAEGGAKTLSGGRPGAGPELELGTAGSPGGAPPEAAPGDCTRAPPPSSESRPPCHGGRQRLSDMSISTSSSDSLEFDRSMPLFGYEADTNSSLEDYEGESDQETMAPPIKSKKKRSSSFVLPKLVKSQLQKVSGVFSSFMTPEKRMVRRIAELSRDKCTYFGCLVQDYVSFLQENKECHVSSTDMLQTIRQFMTQVKNYLSQSSELDPPIESLIPEDQIDVVLEKAMHKCILKPLKGHVEAMLKDFHMADGSWKQLKENLQLVRQRNPQELGVFAPTPDFVDVEKIKVKFMTMQKMYSPEKKVMLLLRVCKLIYTVMENNSGRMYGADDFLPVLTYVIAQCDMLELDTEIEYMMELLDPSLLHGEGGYYLTSAYGALSLIKNFQEEQAARLLSSETRDTLRQWHKRRTTNRTIPSVDDFQNYLRVAFQEVNSGCTGKTLLVRPYITTEDVCQICAEKFKVGDPEEYSLFLFVDETWQQLAEDTYPQKIKAELHSRPQPHIFHFVYKRIKNDPYGIIFQNGEEDLTTS

SEQ ID NO: 1500 - DNA, 4685 bp, Homo sapiens
agccagcctccagcggtctcacatagcaggcaggcagtgcagcctggagcccagccaggggacgcaggaatcctttctgctttttaaggacagactttgctttaccacagcagtcgctcttggggccacacggaaagccaccactgagtttactataaagtgacagaggctggtgtctctaggagaatgaggaatagtcacttcctgcctttgtccattagcgccgaccaacgcgaccagctccgtttacattctttcagtggtgttgttgaaagggcttggcagctcccaaatgtttgcagtgtccttagtcctatgagggctgccttcttcttcttcttcttctttttttttttttttttttgctagcttttagctagtatctggaaacatctactggacatgttggactcattttctcaagaatccactttacccttcagggaagccaggaaaagaacaagcttccaaccggtacaagtctggaggaatttcacagcctctcaaactacggagtccccggcgtgcagtggagcctcgctgggggaaatgacagcttggaccatgggcgcccgcggtctggacaagcgaggaagtttctttaagctcattgacacaattgcctcggagatcggagaactgaaacaggagatggtgcggacagatgtcaacctggaaaatggcctggaacccgctgaaacccacagcatggtaagacacaaggatggtggctattccgaggaagaggacgtgaagacctgtgcccgggactcaggctatgacagcctctccaacaggctcagcatcttggaccggctcctccacacccaccccatatggctgcagctgagtctgagtgaggaggaggcagcagaggtcctgcaggcccagcctccggggatcttcctggttcataaatctaccaagatgcagaagaaagtcctctccctccgcctgccctgtgaatttggggccccactcaaggaatttgccataaaggaaagcacatacaggatgttctaccatttaccttgaagttgccttatgccatttcaacagccaagtcggaggctcagcttgaagaactggcccagatgggactaaatttctggagctccccagctgacagcaaacccccgaaccttccacctccccataggcctctttcctccgacggtgtctgtcctgcctccctgcgtcagctctgccttataaatggagtgcattctatcaaaaccaggacgccttcagagctggagtgcagccagaccaacggggccctgtgctttattaatccccttttcttgaaagtgcacagccaggacctcagtggaggcctgaaacggccgagcacaaggactcccaacgcgaatggcacggagcggactcggtcccccccacccaggcccccgccacccgctattaatagtctccacacaagccctcggctggccaggactgaaacccagacgagcatgccagaaacagtcaaccataacaaacatgggaacgtagctctgcctggaacgaaaccaactcccatccctccaccccggctgaagaagcaggcttcttttctggaagcagagggcggtgcaaagaccttgagcggcggccggccgggcgcaggcccggagctggagctgggcacagctggcagcccaggtggggccccgcctgaggccgccccgggggattgcacaagggccccgccgcccagctctgaatcacggcccccgtgccatggaggccggcagcggctgagcgacatgagcatttctacttcctcctccgactcgctggagttcgaccggagcatgcctctgtttggctacgaggcggacaccaacagcagcctggaggactacgagggggaaagtgaccaagagaccatggcgccccccatcaagtccaaaaagaaaaggagcagctccttcgtgctgcccaagctcgtcaagtcccagctgcagaaggtgagcggggtgttcagctccttcatgaccccggagaagcggatggtccgcaggatcgccgagctttcccgggacaaatgcacctacttcgggtgcttagtgcaggactacgtgagcttcctgcaggagaacaaggagtgccacgtgtccagcaccgacatgctgcagaccatccggcagttcatgacccaggtcaagaactatttgtctcagagctcggagctggacccccccatcgagtcgctgatccctgaagaccaaatagatgtggtgctggaaaaagccatgcacaagtgcatcttgaagcccctcaaggggcacgtggaggccatgctgaaggactttcacatggccgatggctcatggaagcaactcaaggagaacctgcagcttgtgcggcagaggaatccgcaggagctgggggtcttcgccccgacccctgattttgtggatgtggagaaaatcaaagtcaagttcatgaccatgcagaagatgtattcgccggaaaagaaggtcatgctgctgctgcgggtctgcaagctcatttacacggtcatggagaacaactcagggaggatgtatggcgctgatgacttcttgccagtcctgacctatgtcatagcccagtgtgacatgcttgaattggacactgaaatcgagtacatgatggagctcctagacccatcgctgttacatggagaaggaggctattacttgacaagcgcatatggagcactttctctgataaagaatttccaagaagaacaagcagcgcgactgctcagctcagaaaccagagacaccctgaggcagtggcacaaacggagaaccaccaaccggaccatcccctctgtggacgacttccagaattacctccgagttgcatttcaggaggtcaacagtggttgcacaggaaagaccctccttgtgagaccttacatcaccactgaggatgtgtgtcagatctgcgctgagaagttcaaggtgggggaccctgaggagtacagcctctttctcttcgttgacgagacatggcagcagctggcagaggacacttaccctcaaaaaatcaaggcggagctgcacagccgaccacagccccacatcttccactttgtctacaaacgcatcaagaacgatccttatggcatcattttccagaacggggaagaagacctcaccacctcctagaagacaggcgggacttcccagtggtgcatccaaaggggagctggaagccttgccttcccgcttctacatgcttgagcttgaaaagcagtcacctcctcggggacccctcagtgtagtgactaagccatccacaggccaactcggccaagggcaactttagccacgcaaggtagctgaggtttgtgaaacagtaggattctcttttggcaatggagaattgcatctgatggttcaagtgtcctgagattgtttgctacctacccccagtcaggttctaggttggcttacaggtatgtatatgtgcagaagaaacacttaagatacaagttcttttgaattcaacagcagatgcttgcgatgcagtgcgtcaggtgattctcactcctgtggatggcttcatccctgccttccttcctttctttttccttttttttttttttttttttttttacaaagagccttcatgtttttatatatttcatagaaatttttatagcagttgcaggtaaactgtcaggattggttttaaaatatttttgtaactttaaaatattctataattatgcatgtgattttaacatttaatattcaaaaataaatctcttgctggatttgagagtattgcatttttaaagtctctcttctgtaactggatgttttggcaactttgtggggagagactgctggatttcttaaagcaacgtattcctgacactggccacagaatgcctttggaaatcggatgtactgttctcttgttcacgtttagtggtgttttgctgttttgttttttaaacaaatgatgctgagaataaggagagaaatgaatgtagagagaggtagagagagaaatatgaactctaacaaaggactgaggagtgcagtctgctggttcaggctcttcaaaagatgtagaaaaagagatagaaggaaccacctatgcttaaaatactgtaaatatgcagtgaggtttggcaaaatctattccatgtgtgatttgcttgtagaaacaattttgaaagccccttgaggaaaataaaaatcaagaagaacacttttctcccttttccatacaaattaaaacttaacagcatcaaattattgggaccagaaaccaagtaatgtataatgtggcttttgttgagttaaataagatgctatataatggagaagaatttgaaaatgcacaaaaaaatcaatctacattatcagaacctgcagtgaaattaaacttatgttaaataaaaccagtttgcaggtgcacaaactatgagggtcttgtatccacgtaacacaggtagttacaaaaacatgttattgtactgtgtaaagatgcatagtcatctcatttggttggctttgtaccttgtaccttttttagccttggcttttgttgaactagaaccctcagcacatactgtgttgtacttttgtaaatgattttttaaatggaattttgcacataatacattgtaatactgtatgataatcatgtgtgaaaataatttttgaaatatcctt

SEQ ID NO: 1501 - protein, 685 aa, Homo sapiens
MQFWSSPADSKPPNLPPPHRPLSSDGVCPASLRQLCLINGVHSIKTRTPSELECSQTNGALCFINPLFLKVHSQDLSGGLKRPSTRTPNANGTERTRSPPPRPPPPAINSLHTSPRLARTETQTSMPETVNHNKHGNVPGTKPTPIPPPRLKKQASFLEAEGGAKTLSGGRPGAGPELELGTAGSPGGAPPEAAPGDCTRAPPPSSESRPPCHGGRQRLSDMSISTSSSDSLEFDRSMPLFGYEADTNSSLEDYEGESDQETMAPPIKSKKKRSSSFVLPKLVKSQLQKVSGVFSSFMTPEKRMVRRIAELSRDKCTYFGCLVQDYVSFLQENKECHVSSTDMLQTIRQFMTQVKNYLSQSSELDPPIESLIPEDQIDVVLEKAMHKCILKPLKGHVEAMLKDFHMADGSWKQLKENLQLVRQRNPQELGVFAPTPDFVDVEKIKVKFMTMQKMYSPEKKVMLLLRVCKLIYTVMENNSGRMYGADDFLPVLTYVIAQCDMLELDTEIEYMMELLDPSLLHGEGGYYLTSAYGALSLIKNFQEEQAARLLSSETRDTLRQWHKRRTTNRTIPSVDDFQNYLRVAFQEVNSGCTGKTLLVRPYITTEDVCQICAEKFKVGDPEEYSLFLFVDETWQQLAEDTYPQKIKAELHSRPQPHIFHFVYKRIKNDPYGIIFQNGEEDLTTS

SEQ ID NO: 1502 - DNA, 69102 bp, Mus musculus
  misc_feature (1)...(69102): n = A,T,C or G
gctgtcaagccttccccagcatgatggaccttgccctcaaactatgagccaaaaccaaacccttctttctttaagattttttgtttgctcgttttttacaggcattgatcacagaaacaagaaaagtatccaacagtggtcatttcaacagatgttggttgttatccatagttactgtgttgtgcagtggacctattgttactacagcgtcaacttagtcatttacttttatcagcatgtgtgtgtctgtttatgtgtgtgtgtgtgtgtgtgtttctatatgtgtctctgtgggtatatgtatgtgtgtctctgtgtgtgtctgtgtgtatgtgtcactgtgtgtgtctgtctctttgtgtatatgtgtgtgtgtctctgtgtgtgtctgtctctgtgtctctgtatatgtgtgtgtctgtctctgtctgtatatgtgtgtgtgtctgtatctctgtgtgtatatgtgtgtctgtttctgtatctctgtgtgtatatgtgtgtctgtctctgtgtctctgtgtgtatatgtttatgtgtctgtgtctctgtgtatatgtgtgtgtgtctctgtgtgcatatatgtgtgtgtctatctgtgtgtctctgtgtatgtctgtgtgtatatgtttgtgtgtctgtctgtgtctctctgtgtgcatatgtgtgtgtgtctgtgtgtgtgtgtctgtatgtctgtctgtgtctctctgtgtgtatatgtgtgtctgtctgtgtgtgtgtctgtctatgtgtctctgtgtgtgcacgctttgcgtttcctgccatgcttagtttcttagttaacatctatgttttcctctttccatcattcagtttcctccatttccccctctgctagattagaagttatacattctgtattacatgtggctggtctcacataactattaaatgtagattagaactcctcaaatagtgaaaggattctaggaagttgcctctgacctgtcaccttttgtgctcctgttgcccaggattttgtctgtatcttgtttttcttagccccatggccataacagacatttcctgtcactaacacttgtttatattcacccactggtgagacactgaaagtatgtctcataggtactctgtagaggtgaaactgtcctatatataagatacatctatgtttctaaggttgatgaccaattcccattcctgggttggaagtctgtcttctccagttttataacaacaacactgttagataatttgcctaggatgttgtaagtgatggtgtagaatgtatttagcctgcttggactctgtgtgtgtccatgatttttgaagtctttcattgataacagaaatgctgcagcttttaactcaacctctctgtgttctctttcctgggatctctaaatgtatgtgtgtgtgtgtgtcccacattctgtgtcttgtgtcctcttttacaaagtttcgatctttttgactctgctatatattcttctttgatgggggaaatttatttagctcatagttactgctaggatagaggtagggtatgttccttaagcctattttttcatctctaccttattatccttatttgttctttccccattacacctactcttttgttgctgttgttgttattgctgttattgttgctattgttgcagttattgtgtgtctctggctggcttggaacttgatatgtagatcaggctgacctcaaacacagagatctgtctgcttctgtttctgcccctcacatgtaaggattaaaggtgtgagacaccatacatggccactcttaggttttcttgttcgtttgatttttgagtgttgctgtgaagcctaggctgggcttcagctcccaggcttaagtgatcctttggtctcagcatcctgaacagttggccctgcttagtttgttgtttgcttgctgttcctgcttgcaaacttttgctccaatcctttcactgattggcttagaagttctgtactgtttttagttttctaagagttatacattcactttcacctgcaaacatgtttctgccaccatctggagcagggcagtcgcatcatgccttcatctaggaaaggcctctggtgtgcttcttctccgtgactttcagccaaaatctgaaggtttccctgagtgttctgctgctcatctgggtcctggcaacttctgctctcatctttctttctttctctctttctttctctctttctttctctttctttctttctttctttctttctttctttctttctttctttctcccttccttccttccttccttccttccttccttccttccttccttcctccctccctccctccctcccctctctctctctctttctctctctctctctttctttctttctttctttctttctttctttctttccttattcatttattttatttatatgagtgtgctacctgtatgtacacctgcatcccagaagagggcatcagatccaagtatagatgacggtgagccaccatgtggttgctggaaattgaactcaggtcctctggaagaccaggcagtgctcttaacttctgagccacctctccagccccctctgtatgaatcttgggctacacattttctttctttccactgtacttatctgccacctgctgggggctttccctctagtttctttttaatcttggagtgcatgtgccttaatttatcatattttaaaagtaaatataattattcattcatcaaatgaaatcttactaactaactcaattttatatacccaattgaccaaattaactgtgtgtcttgaacattaaaaagatagatctctcatctgcttatccagagtcagaatcattgaggtgagaactatcaaactgtctctgctggtcatcctgtgttcacgaattattttaagagaccgtcctcagggtatgcagtattgaggtagttctggacttctttccatggtggcatcctttaagaaatgtcttatgttccagttgatttatccaggggcagattacaggcagagttgcctacacaggacagaaatagctttgaaggcaagggtagacttctgccacctggtggcagtgttggtcagttttacaattccttgggggctgtaattgttgacactctgtttcgctcctgatcagcaaacacatgtcctcttgggattcccagctgaggtcttcagggctgggtcatgtttaatcactcgctgactgtccagaaactcagcaggtgttttctggctcatccttgcctgtgatctgtcttcaagtcacacctgccctataaatcttcctccttgggtcttggctgagaggttgggaggcccaaaattgctgagactgtagccagatgtggtgatggcagttgtagtttgctttgacacgaacctgatagttcagatctgccagaattccattctctgagtcaccttcttctttgtagtctcttgggggcccaggaaccttggaactttcggcaaaaacaaatcttcaagaagaatctacctgaaaggatgaacagtacgcttggtccaagaccacaggaggtgggatggggtgcaggaagtgttggggacctttaactcagaaaaagaataggtggatccagatgtgtaaggacatccccaagacaaaacaatgaaggtcttgagtgagattaggcacaggatttggggagacattcaggtccccagaaaaggggcatgcctttttaagagtgttgtgggactacagtgagctaatgaattcccaggcaccaagtgtagcccagtgaatatgtgcttagcatatgtaatgcccagggctccacccccagcactaactatgttaacgtgttttggtgttagccagctttcctgatcatgtggctggagctaactggggctgatccaccatggagtgcctcgtgcagtactctcagaacagatgggcatgaagatgggggaaattcagcgcccccaggaaggcatcactctgtcaccctctgtcaccctcctgaagttgcttctgcttttcacttcttcctcttgagggtcagcgcttgtctcctgtgtatctgcgtgtctgttgggctaatcctgccgagtgtatatagcttatacgcagccgcagtgttacaccatcagaccctgggcctgctgcggttgggtagggaccattaggcctccactgccaaagggcacatgtatacagagcaaccgcatacttccttgtcatcaccgagtctgtgagaaaggagaagtcacccagaatgcgtggcttctggctctctccttcctttgacccttttcaatgcgctgtctgtcacagattccccgcttcagttttgctttgcatcctcgtgatctgaacgggcatcatgacctcattgagtgcaaggccttttgcctggtagatgcccctcagctctgccagtctacacagaagggacatatagatctcttataagtgtcaactggaagaagcgtgggatatgggagtgatggataataagatggaggagacacgggtataggaagcgagagttttagagggcctttggaggccactgacttgacagtgaaaggatttggtgactccatgctaggccttaataatggaagagggtccttaataaatccacttccaaccaaaatgttttactatttatttagtttctcacggtactggaacccagagcttcttgtgcctggcaagtgtcccactattgggccatatccttagcctgagactgtttcttttattatgcgactatcacaggaggccattctttttgactgggcatagtagaaaagccaaaaacccagagttggaaggatgcctcagtctgtgaagtgtttgcttcacaaacacaaagacacgggcttggttctgagaacccacaaaaataccaagcatagtggtgttctctgtgtgtgtttgtaatgtcagggctcgggagacagagataggagaattccttgggcttgttggccagctagtctaccttaattcataagccccaggccaacgaggatccgtgtctcaaaggaggtggatggtgctcctgacaatggcagagcattgtcctctggcctggacacgcagacttgtatatattatatgcatcactctcacatgtgcacactcccaaacccacacgcaaatagatggggttattcatgctaaagtatatgccacaaagatgaaactgggcagctgatctcatcttcagaggaacagagagcaaagaaccacgtgtcccatgttctcagcggggctggtgatgaagttccatccacattcttccttgcacagaacgggaagctggggggtatcttgggttgagccactgtgatttacccactgttgtctgttcctgactctacaagaaaagtgattttgaaatgacgatctgccttttggccgttgtctctgctttcttcagttcttctctgtcttcccaacccactttctctgcctggtctgcggtaacacctggtatatttcctgggacggtacatcaaggattgaaaataaagctagttgagatcattgaatgcttatgacttttttctttttctttttctaacctctctttatgatatgagataggagccacgaaagccaaggcaaaggagtggtagaggtgagcacccctgggaatttcccaataagtccttgaggcccagagttacaaatgacccctgccttgtttctggccttgggcatgagaacaagtgcatccagcttcagggcttgaaggctcaggagtaactctgctaagaccagtgctgagatgaaagacaagccccaggctccattcctgcagcctgcaccctgcagcctgcaccctgaggttcccagccctgcatcctactgacttcaaagccaggctgcaaaagggaaaactgacatggccccatgaccggtgttcttacaactgagggctccagaaaagcaacctgtggaccccgggctgggtaaggctcacccttccggtttcagagggacaacctcagccttaggctgtgacactctggaggaaaggccccatgtggcctcttagcttggcagtagaaagtgcagttctgcccaatctggctgattctgcttcatgtacatatccgatccaaagaggaaacaggaactgggtggtgtgtctttatttggaaacagaggcagagttgtagctcaaagttatagtgcagggtaagcacgcagaagaccttgggtttaattcttagtgaaaaattggagggggtggggtgaaaatacatttcttaggaatcaaagatgatagaaaggtacactccccacgtatcccatggcaatcgtagagaagcctctgtactgtctcatacacttgttttaacaggcaactactgtgaatgcactatgtgccaggaaaagtctgtgttggagactgggtgttctgtgtctgtgccaaacactgaagctggcatcttctcccatctcaagatgtcccagctttcaggaagagagagaagtatacaaaaagcttatatacatgtgctaccaagaacagtgaagtcagaagtcagacatgggtgtgaacgccaaggtgatgcatccatgagggcgacagaacagagctgtggacaaagggagtttgaagaggtctgaaggaagtggagggaggtggtctatatgggtctctaggacaaagtgacccaggcaagagaagtagtctgtgcaaagttctgaggcaggagtgtgcctgctgtttggaggtcaggaggccagtatggctgctgactgaaaaagtgagggtggagaaaacacccgcaggaggcgggcctggatcaagtagacccctcctctttctcttagatccctcccatctcctttctcttctcttttccttttgggagacaaaatcttgctgtgttgtacagctagcaagggatcctcctgcctcagattcccaagtagctgggactataagcataaacctctgtcctgggcatttctcatacttgactgtacacatatggcttctggggatgtggtaaatgcaggttgtgaagcactaagcctgccatggggcccagcagtcagtatgtctctgctgcctggaagatgctcatgaggtaaagtccatgggcagctcttccaatatgaaggatgagccttgccaggtagggtactggggaagaaaggcgtgtaggagacactggcttgttctgagtgcagacagacctcacctgatctttgttttctttttctatcctactcttcctttccttttctttcttcctttttctccctgatgctggggatggaacctagggccttgtacatgctaggcaatagctccaccactgagccacagctgcagatagctccagcccttaacctttgttcttaaagaaactgcattagctgattaggccatacaagaaaagggtgaacacaactgcaagcccactgaataatattttttttaaaaagtggtggtggggtggggggaggggctattattctgacggtgatccctggggtacttgctaataggttgctagtaccatgtatgagagaaaagtctaggttgacaagattatatgccacttgaacaatgagaacatgtattcaccttctttaatctggaaggacagtgtttgagaaagaggtttcaggatgtggtatatttaagaggttaattagacatttaaataggggctggggctgcgctcagttggtacactatttggctagaatgcttgaagccctaggtttggttcccaacatcccatatagaaagtatggtgacacatctgcgtgatacacaagaagtgcaggtagggcggaggattaaaagttcaaggtcattcaagtctgaggctggcactgtctcaaaaaaacaaaagcaaaacctaacatttgaatatgggctgaaactggaggaaacgttctggttccaggttccagcttgaaagacaaggggacctggaggggaaagtggaggattgagaactccagcactttgaagacaaggagagagaagacaacgcgtgcaggggatgaggtgtaggaactggcaaagggaaggcctcacattttaggagtagtttttgtgccagctagctacagctgagtaataaagttaagattatctgagacttcttccaacctcgcaaatcactagaaaggccttttgtgctgagggtgaggctccatacctggtatagagcagccaaggtggatgcacatctgtccagagctgttcctggttgtgggctggtgcaactcagtctctctgtgggttctttgcccccagaaggcaggaccaactccctcacaccatggcagctgggaaccaaccaaccaaaaaaaaaagaagcagcacacagggtttcctcaacacagccttggcatctagccagcctgtcaaagtatcacttctgccatgtcctctggagtaaagctaggaggtcagctagcctggatcttcatccttttagagggttatgcatgctgacagtagaactcagggcctgtgcatgctaggcaggtgttttgtctctgagccacacccccaactcagcttccacacctccagctcagtctcctggtcttggtggagcaggaaatgccgagtacacactggaggaggaagtgttggtgggtatctctcagaccacctggcagagtctgccctttctcttacctatagctttatgtgttcaactaaaatgtgctcttttataagtctctttttattagcttgagtgcttccttatttattcgagcactatgtaaccttctgtgttccattgttttgtttctggccctagcctagcttttggtttgatttggtttcttaaggtggagactagcaatgttgttcaggctactctcaaactcatggtctccagggtgtgatctttttgccttggactcgtgaatagctgggaccccagatgtgcaccactgtgcccacttgcctaacttttgaattaaggacaagtgcttggctgagggcaggacatatgcctgtgctagttgttggcaccgccttcctcctcagcagcttgcccacagtatcccctccaaggaaactacctatctacagctgtcattgccaacaggaaaaagtctttgccagcccgaagaactccacaaaccagttttccaaagtctccgacctctagtgtttattttttttattatttattcacttcttaagtatttggtagagacacatttctttttactcttgattattcagtaacaaaaacttgaacttcatgacggagctgatggtcaacgaggcccaatgtgatatggacattgatttattctttcccatagcttcccaccacctggaatcagcaaagggtcccaaggaagtggtacctgccctggcagaggtcagcagctggtaaccaaaatattgttactggactcaggccttcatagcacctcctttcctgtttgaaggcccccagggttgctcatcagccctttagcccgctgcgggtgatttatgtgtgtgtggcatggttgtacaggcccacaccattgggagagggctttactctcagaaggtctcctaaggaggaaagctttgacttcaatctatggtatgctgaaccaactgacggttcatccacaccatctgtgagctgcttcgctcttatgaccacttagacgcgttcccaatcttatctcagagcgctgcctgtgtcccaggtccggaggctgggccaaccgtgtacttgcagcttctgtcgccagccagaaagttatttggtctgtaaaaagagatcgcagaaacccaggaaactgaagccgagagcgcgggctagccccggactgggcgcacaacaaaacctagttctacccacctcccggagtccctgtccaggagggaagaggtgggaaggggcaggctcaaggaagctgcttctccgggagagaagtagtgggtggtggccgcgggggcggagccggggcggggccgtggagactcttaggggcgctcaggctaccgcacccgcgtggggcgtcgggcgagatggcggcgcgcagcctcggcagcggtgtggggcgactgctgcgtggcctgcaagggcgctctggacaatcggggtggtcactgagcgtgtcccgctcgaccgccacccgactcccgggctgcgttcctgcagcagcgcaaccaggctcgtaccccgcgttgagcgctcaggcagcccaggagccggccgccttctgggggccgctggcccgtgacacactagtttgggacactccttaccatactgtctgggactgtgacttcaggacgggcaagatcggctggttcctgggaggccagttgaatgtgtctggtgagtgccttgctgggtccagctcattttcgccgagactcgggaggctccagtcagtagcagctgcccccaggccttggctcttttctccagaatgcttcaccacccaccctaatccttgggtcacgtcactttgttctgtattccaccggatctagagactgcagctggcgaagcagcagttaccctcccaagtctgcagcgctgtctctagcgggaaactggggatacccggtttaacctcagagtgttctaccctaacacagattctagggggctttgtcttcagacacaaagcttaggaccccagataggcctagatggagagagcccatgctccaagagtccaggcttttctgactcagggcccccagatcagcagggtaaacgcaaagtacataggttgctatcggcaactgcaggtgctagggctcgaggctcccctgaggacaaaccttgcagtgtaaacagagcttggtgggtgcaggaagaagaaagtgtcagcccctgggagggaactgcttatctcctccggttggggtatgtgggcaggaagttctcggtctaagaactgcaccccaaaaacaaacgtctacagtgtcaaaggcaggtgtaacttcagctctccggagtctgagtcaagaggagctgaactcaaagccagcttggactatgtaccagcctcccccttgatctctaaacgagacacatcagtcactctagctgtcagttttctgatgagcccggattctgctgagggtggaggcagggaaacacacggaggagccgagaactgaaggaggggttggactgagaggggctggacagacaggctgtgtctctggtgcacagcagagggttgggaacttttgcattcctgtgggatgggagcgagggttggatgggtcagagatgcgtaagggacgaactgaaggtctttaagacgaggtggcaggtgatgctttgtttaaggaccaaagttagaggtggaatctggtgtctgcagtttcactacctcttcagctttggtgcgtctcaatcgccccatttgtaaaatgagaaagcaatactcacctcttatgctgtctgtaccgcagtgctgggggtggggatacagtaacctgtccaggcttactggtgatcaataagctgtagcagttctgatttaatatattcagaaattatagggtctgtttttatttatttatttatttatttatttatttatttatttatttatttattatatgtaagtacactgtagctgtcttcagatactccagaagagggcatcagatttcattacggatggttgtgagccaccatgtggttgctgggatttgaactcgggaacttcgaaagagcagtcagcgctcttaaccactgagccatcttgccagccccctgttctttttttaaagcacaaaactttaaagaaactttggacaagtcatttttcccccgtatattatatcacttgacaagtttaatctaaatgagtcttttactagataagtgttgcctttagacttgagtcagcaaattcttcaacttgggttaagaagttcttgcgtttgcagaaagtgtccttcaagtgagtatagcagtttgcagaaggaagggggcagaaagtgtgcggcttctttggaaacctctcctcccttaagaggtcaaggccgctgggacgaccaagcttgtagctgataagaagtggtatcagccttatggtgaggcttgggtgtggtcttctaggaattctctggcctctattcttctactattagagctgtgtgagccagacagagtttgaacttcgccaaactgacatgcaagaaagcagcttctccaaatgtctggcttcctatctgtcagcagcatctttgccctttgcccgtttctgcaacctccaggggttacagtgtgaacagggaacagaccgactgcagctgctctgggagccacttagagagttgttaagtcattgggctgtttaggcctgatctgtttatgtgtgataatgacaacttgttccaaaaatttgagtggcactattatccttccagtgatcttcaggctaatgcttttcaaaggtccagaccaatgctgctggaccaggaagcttttagagatgcaaattcgggggcccactctagactcttaggtttagaaaccccgtggctgggtgtcttccagctgtgattgacaggccctgcaggtgcttggcacagcacacacagcacagtttggtggtttcagctgggtcttttgggctacactgaggtcttaattcttacttcattgcatttcacatgtttccttatatttgacctaaagagagcagtgtgtcctggaatattattgtagttaccattgttccatactctaatttagctgtactgctggataatgacccttttattatcctgaggtcttaggtcaggactctcagggcccacgggggtctactctctccccttccctgatatctcacctcctggtttgaggcctgagtggtgggtgctatgcttagaatatggttcatcccctaagctcctcagtaaagtccccttgtcagctattatgagggaggtagctaggattgggagaggttatccgggctgagataaaaggttctgatcttggtgttttataagagggagtggccagaagagataatggatgtctcattccacgtgatgctctgcctcattttagggcacactcatcaaagacagcattaccagacacaagcctttgaacttctagatgcatgagctaaataactgtttgtaaaaatagccatcctctgttatttcatcaaggttcctgagaatggattgtacagttgtgataagtgaaatttcaggctgggctcaactgaaacatgtcctgcaaaccacacaaagcatctcatggtataatggctaggttcatggaaggttctgtgtcctgagggtcaagagactcaggtaggaatgaaggctcctgctgagcaggctgtctggggtggggagggtacttggttgccgttgttgccccatcagatgatgttctcagcacacgcagccggggctcttgctaggattaggtgagattaaagctcttgacactgttcttagcacagtgcagccctaaccactcatcgctgttaattattaatgaagcatttggggaagcagtgaccttggtttgtccttcaggaggctgctgagtattgtgcccatctgaaacagaccctgttgcaggatatttgatcacactgtgaaccctgagattgtgttatttactgaaaaatacctgtttctagtccgggtgtggcctagcctttagcacacacctttaatccctctggctggaatatacactcttaatcccaaacaatgaaggtaaagttagtttgtagaaggaagcacctatgtttgaaagtgacatttaattgagtggcagacaaagtgaccaactggagaaaaatttgacatgataggatctgtccaattctcatgagaagagagaagaaggggaagctacttaagagagcagtgcagagagagagagggtggagagggagggaggcagttttaccaggacacttgtacagggacaggttgcagagagataacaagctagacataggtgaagacagaacaagccagagaatgaggaggagccagaagagtcaaacaacttgctaaagtcagtatgaggccaaagagagcaattcagttagaaactaagagaagccagattgaatcggtcatcttggagacaagtttgagctagaacagctgagttgaccagccagctagagttcagaaagagctagaaagcgtgagcttgtttagcagtaagtctcagatctactttgtagatcaagctgttctggaatgcaaagagattcatctgcctctgccttcacctcctagtactgggattaaaggcatattgccactatgcctggctggaataaactaattttaactttaactatccattgagagtcttcttgggtgtttttgtttggttgttttttgtttttctgtttttttgttttttcttttgggaatggagcccagagtctcacagaggctaggctggtactctgccactgaatgccactaaggcctctagatactttaggaacaccgcacaaacagaagtcacgttgctgatgctttcctcgatggctgagatgatggcagataaagctggtcgaaccttttaaggaactccaaatgaaaacgcagctccagtttcatgaggcagagcttctggaagaatctgaattcttctccgtcgtcagaagcgtgacttgctttaaatagcagctgcttctggaaagttggcaaatatagcttttggaaggaaagttctcacaatgtgccagggaaattcgctatttaaagaaagccattgtgaatcctcgtgtacttattaatcccagttccttttcatgacgcttgaagctttgtgtgctggattcacttacatctgagctgggtgtgggtgtgtgtgtatttaaacaaccaatcagagctttttggagcaggggtgtggtttcgtagttgtacagttagttagcctgtaggaaactctacattccgttccttgtgctataaggttgggggtgggagtttgaaaattcctacattattgtgtgccacatctttgtaatagaagtaataacacttgtaatttgtgtgtgtgtgtgtgttgttaataaaactaaatctctgatccactaacaagcattaatggaactgctcataagactgtgttaggatctgggctgggctgctgtgtgctacagttaccgagaaggagccccatggctgagcagataccctgtttttaagggccatatctcactcttaatgatgcaaacatggaatggtcctgttgtatagatggagacacaaaggcccaacctcagaaacagtggaagatgcccactgtcatagcacccgagcgacacaaagagatagatgataaatctgctgttggaagaactactatgatgtgctctgacacggtcagttggacaacacttagtctcataaaagatatcaagtatcgaaagctgccttttgtagccagagaagggctgagaactcacagtagagatcagaaaacgaattggctgtttcagccacatcccttgaaaggtaggaacaggaagacaggaccatgtgaaaacaatggacagctaactcaccaaggctgtgtgtctccttttccgaataagcacataggcgggagaacttcatcacaaggcacactgaaagtttggtttcaacttttgtgcctctgatcttgatttctccaaaggtccgatgaacagccgtgtttcagcttggcgatatgaactttagcatgaacaattccgttttgatttttagtctggcctgtgctagagcttagaccaaaacaatggtctcctgttaattttgctttgacagagtgaaaaagtgcatctgtactggggtgatgtgctcaaggtacccacatggcaggtgaagaaggtctgtggctctccaccagtccccaggagaaaggactctgggcacagtaaggaagtgttacatggagtaggccaactgagaagtgggaggacagaggctcactgtgtacaggggacttagaaggcttaaagtaggaggtggggtttgagctctgccttcagttgtgctgggccccggcccaattcctcttgaaaatgctggaaggtggaaagttcttgtctcacggcccattctttggattgagttgctttttcttttacatgtagaggttttgtataggcaggcagagtatcctccatgtcttccttcctctccccaaccttccctgtcttcctttttccctcttgcctctttcctcacttcccttttccttctcccccatcccttcccttcctctctcctttttgtctctcactctcctatttctcctccctgcctctttccttttttctttgccaccccttcttttcttccctgtaactgaagcagtgggaggaattgtagtatttgctaaaaaaccaaccaaccaaccaaccaaacaaccaaacaaaaaaaccattatgaacttggaattttaggttcatggttctgtcaggacccatactgagatggttctaaggaatggattattctgttggcatgttccttggggacattgtgacatcctcaggtccaatctcatgacacacttgtgggtggctaattcttatactcacccagagtcaagggttgctatgccaccctgtggattaaaaagctgagacttgaagtaaatgacaagggcactgtagttagtgggtggctggcctggagccagacctgaggattttttttttttaggtagctgcaggctgccaaccaataaggtatggccaggtgtcatactgggctatcaagtacctttattacccccacacccccaccaggaagagaaagaaatggaatccccacaaaatctggaagcgtcatatacagtgatgtacctgtaaacacacaagagtctgccagtgtgtggttccaagacaggctgcagcaggactgtttccttaaaatgcatagtctctgccaggggctggtgggctcccagctgtccagaacagctcatacttcctgctcttaaccagttctatcctgattctccttcatgatttttccttagcactgattccctggtgacctttcctaacttgtcatgaccagttcagagtcacctccaccaccaggcagctggggacacagccctgtgccaagggctgacttctttgttgactgttaacaagctctgaagccatgattttaggatgaaaactcttggtgtttgggcatttgtgtacacacacacacacacacacacacacacacacacacacacatacacacacacaatcgccacaccagtaaactagattcagcctggcagcgcattcagctgacatttgtgaagctagcttgctagtttcttcccccaacagccttgtttttccagtctctgtagcatctgcctattctcagctgcttgcacacttccccgttctgcacagttctaagattcttctgtctgtggatcacacctcttcatagctcctctcccctttgccacagattgggctcagctttcttccatctgctgcacagagcagttcttgaccgcctgtttggaccatttcagggagagtggagggccatgtgagggacctggagctagtacgagtcaaatctgttagtgtgtgaccttcggcaggctgctcaatctctgcacttcacaccaaggatgagaaatactgggagtgggtccctcaggatgctgctcacatccagactctggctgttactgttcgtcccaagttgctctttgcttctgtgaaaaggtttgtcttgtctgggtaacttcagccccagtgatctgttgatctgagtccatctcagatttcctccaaataccttgaggccactggtgggaatatgcttgggtagaagtgggcactgcatgaactgacccgagttaaactcacctttaaaatcaagtgatcagtgaacaggatgtcaacagaactgagcccacttgtcttcaggtttatggtaaacaagcccattgaccttgtgcttttcccagcaagtcatgtgagccgagcttgggtagcagagggggaggggagaactttcttgaaaggcatgcccagcttaaggtggtgatgccacatggatccagtgtggagaccactggaatggtgggatgacctcagagtctgcgtggaaggtcaccttgtaggcaggtcgtgtttgtagtgattgtccctgttctctgcagttgtggcagttactccttcctgagagagagatcctgctctgcaggaacagcaagccacagcaaatcaaatcctattccattcccctctacagcatctggaataacatttgttaacttttctttgcatagtcaactgcctggatcagcatgtgcagaagtctcctgagaccatagctttgatctgggagagagatgaacctgggacagaagtgagaatcacttacaggtactgtgtgacacctgggaccctcaacacccaaaacaccacctggacctttctgaggtttggatttggggaaggtgattgatccctttgtgaccattaacacactttctagtctggaaggactctggttgtgtgtttgcttggtgacgcctaatgtctgaagattcctacagcgatgttaagagactggggaggcattggccctattctgctgctgtgtctggctcaggacatggaattatctaagcactgggagatgtttcagctttgggggtgttctgttagctcaggaaaagaagatgtgggcaagacaggttgtggcaggtatcagagcatgcagaattctagttgtattcagttcaacaaaaaccctgagctggagctactcaaataagacagggcaaactcatgcacaggagctaaagctgccagagcctgaatgtggatggcgtctttggagcacttgctactagtgtctcctgtcactgatgtgaaatgcacagaaattaagtggtctgcctaaggtcacatactagtagatcttaatttgagtcaggttagcgccagggtccttcataccatcctgccctccattgttatcctgtaacggtttaaacaggcagcaaagaattaccctgttatcaataccagctgctggcctttttctatatatcttatggtggggcggtcatttacataagtttttaaaaaggctgacaatgttccttgatttcataaatggaacctatacactatctggacttggagtaccaagtgtgtgatgcagtaccaaggttttagatgaagtagggaacattcagggagatgtggccatagactttgataggtccttggataactggctacctgaagctgctgcctctgggttgtgttacaacagatgctgtggtacagcacggagggtattgcctcttcattgatgcctcattagctgagcataggtataactcactgagagcatgcttgcctagcagaagacctcaggatctattcctagtaatgataataataataataataataataataataaataataataacaacaacaaccaccttttggctaaagatacaatttatctttataacagcatctataatttatctttataacggcatctctggcctgccatgtacttaagtcatgtgttctgtgttcatggttccatgttcaggtccaagtgtgtagcttcagcctttccatatccaaccaattgtctagcaagtgttttttcatgcccttatatcagttactactggttagagcatgtcacaataacaaccaatctccaaagcatggcagaaggtcactttaggttgaatagttagggaaggtctcccagaggatgtttaatctgagatccaactgttgagcagaaataccatatcctggctgcagggagaaagtatggtggctgggccctggggatgaacagggcataggaggagtgttcatggaaacagtttcagaccagggctctgagcgtagcaattgcttgtggacactcaggtaactcaggggcaattgaactctcatttcccatgtgcttctgaaattctagtcttattccagaccaaattcaatcctggtataccattctcaggctgtagaaagcaaagtaacttaaaaaaaaaagaattattttaattatttttaaaatcatgtgtatatgtgtgtagatgtgtgcatgagtgtgggggtatgtgcacgagagtgcaggtccccacagagtccagcagagggcattggatgccctggagccagaggtagaggtaggtggccacctgatgtggatgctaggaactggactctttgtaagaacccactcttaaccactgagccaattctccagtcccaaggtgatatttttaatcttctgtagaaactggtagtgttactggcccactcatgctttatctaccctacctaccagccctctggcatactgtatagccttcatagcttgagggctgtggcatactttgccacctctctccctctctgggctgagcccagggctcctgtagttgttttttccccctctggtacctggcttcagcccccatgtggcctacaaaccaacaacatcttattgctctgagcctggatgaggggatgaccacatggtttctgtacaatggaacttgaggaatgctgcttgtgggaattggctagttcagctgctttgtaaggatttcacgtctaactccatttgcatgtcaatatacatccttctcaaacttggtggctgcttgggaactgtcattcattaaaagacaaaagtcacatgtggtagggcggaggcaagtcacatgaggcagtccattgatgctgctcaaaggaccgtggtttccctcactccccatgacaggtgtgcttagaaccgttggtgcacaagctgctagggatgccctatggccagatgcagcggtatttggcaatctgagctgctgaaatgtatggttgaaggtttaaaggttaaccacacagaacgctcaggtttgcagccagctcattaaagacaagagagatttgaggttgacaggagtaaagtagctcccagacacgcagacacacttctgaatatataagtgaagtgtctgtctactgagctgtccctctacaaacatgcagaattagtttgctgtgccctggtgggtctctgatggcttagaactggatggctgtgtctgctgctgggcaaagtgttacatacactccggaactgaactaagtgtatgaaggtctctaattagcccctccctggccatttaaggtgtttgatttgctacatacataccagtagacagatttcctattacctctgaaataaagtgatttctttcccctgtgtggtggtcaaaagtcctgtagactcaaaggttaagctccagactcttagattctctctctccctctccccctccctcttcccctccccctccccctctcgtagttattcttcttctgctgctagggatgaaattcaggaatttgattatcccaggcaagtgccctgccactgagctacactacagccctgagcatttaaaggaactcggtgtggccaggcacagtggtgcacacttgtactagaaagctggaagatggaaagtatgaggccaacatgtgttacttcgaaagcctctgtctcaacaaacatgcacaaacagctcaccccaaaaccacacacaaagaaaatacaagggcttataacactatgggtaaagtagtgggccctaaatgtagtacccagtgctgcaaagaaaaccagatagaaccctgaggggttgtaattattacaggcgatgatgagggcggtatgtctttctggttccagaagaagctttttctgagcttacaggtgacctggacatctgcatgtagacaggacctggggccgtatagagagaatctgcactgggagcagactggtaccagtgacctttgtcctgtttgtttcctatggtcctcactggttcagattatcctcctgcctgatggtctgacaccacttccctttttgtaaaatggggttgtcagtgaagtgaaaatgactgtctaggactggcccaaagagactgagctgagcatatgcactgaattgcaaacacactaatgagagctagcaacagtaaggtcaacagctgaccagggatattgcaggagtgggtgggttggttagcagggggagtgaggaggggatggaggtttttggaggggaaaccaggaaaggggataacatttgaaaagtaaataaagaaaatatccaataaaaaaacccaaaacaccatgacagaattattttaaagaaaataatttgattagataataataacaatgataataataatgttaattattattttcaacattttgctatgaaaaaacttgaaacggtttctacttaccacctaaattttacggtattttgtggtgtgatatcacaaaccacccccccaccccctgccttgtctgtgtatctatactattttccagtctgtttcaaagtgagttgtggtaatatcaatactgtattaggtactttaaaaaaaaatcatcgccaccaaatatctaacaagaagcaaatgagaggaggaggggcttccttttggctcacagtttgagggtatacagtctgtcgtgctgatgaaagaataactgcaggctgttctgtagtggtggaacagttggtcacctagtgtggtcatcaggaggcagaaagagttccggaaggaagctgggccagactattacctctaggacctgctactgagtgacccacttcctccagcaaggttctcccttctaatgtttctaaacagtaccagttgctaggaaacaactggtactgttgttcaaacacacgagtctctgggggagaggtcacagtcacacttcaaacccgtacaagctctccaacatgtgtgtgtgactaactcgaggatagatcatatgtgcttgttttctattttgatatgaaatttatctgcaatgaacccgttggctgattccaatgcaaaatgcttgtatattttaagatactgtttttgttccttgcacattatcagttcttctgtctggctccccaagtactgttgatcaattttttttctgatatagttttgaatcaaatcttacagataaggagaggactcagaaagtggtgttgtttgtttgtgggcaaatgccttgtgtgggtagagaactacagtttagctctgcgtcagcaaggtcagtgctatgaacccacatcaagtgctgagggccacgtcagcagatgtttctggggcctggtggatcctgggatgaagcccattggaaggaaccatgccagcatctggtctgggatttacctagtcatggatggacacaaatgtgttgccttcctcaggtgccagtgcctctcaccattgtgtctactaagctctctcacaggtgtatttctgagtaatatttctgagtaatctggttttgtgaactaacaacatctttacccagttatttgggattcagccctgaataacacccctctcctaggaactcaaaagtcaccacagtgtgacaagcatggaggtaaacacgcgtgcatgtgcactcactctgtctcacatgccttctaagtcaattcccacagcaagggtaggcacagacttgctttatgccttggcactgtcctttgagaatacatgccctgagtgacttattaacctttgcctgtgagtagacatacatgtgcacatgtatgtctatataacccacttcacatggccttttgtatatggccacaaactcagagcagtgagtaatgagacaaagaacacagttccctgggacactctgccagaggcacttgagattggatgtcctatgtccactccaagctgtgtgaccatagggaagtggtaggcagagtcccccttacacttgtggacagaggtaagccaccgggcaaagcatgggtaatctggtccttttcaaggaaggtgggcagatggcacctgggcagtaccccttctcaccccctgggtgtctttcacatgacaaccctgcatacctcaggtggacattgctgagactcctggtacacgtggagaaaccccagtgcatctgtggtaggcttgatgaggttttaggactctgtttgcctggctggtagggccctccctgtcatgcttgaggggtttagcccagatttctaggtgggagagggtgtaagtcagggaactgactgaggccctgcagtctataagcatgacctcagaagaaaggcaccaggtctgagttaatatagttcttctcttaggctcactgcagaggtctgactttgaaccagagcccaaatgacaggccctaagatcagcttttctctttcagtgtacaacataatgggtttcattgtgccatttttttttcattatgccattttatatgcatatctttatgctttgctcatattcattggcccccatcgctctccccgtacccttcttttattttattggttttcttccttctccctctttcatcttattggtccctttccttcttcattctgtcaagtctttccctgattcattactttgtctggctctcaattagatgccactttcaaacatggctacttccttctgcaaactaactttacgttcattgtttggggttaaaggtgtgtactaagagcatgtctgtattccagccagagtgattgaaggtgtatcattccactgtaccacacagacctagaaggtctttggtgtaattccttgccagagtagctatgttgccagattaaaattcctctacagccacagggaagtgaagaatggggtctggactgtggtggtgcggtgggtctccccttatacatttgacagggatgacttacaccacatactgaagtcagcgtggaggtgggggaaccttgagctggaaccacttccctaggaacctatttctgtcctggaccctgagttctaccaatgtgacaagaaggggctagtctctttgggttgaaatgacaggaaataggaagtcactctttggacatcagttgaggaggttctgggaagacttgggttgaaaggcagaggaagacagcctttggaggggtctgaccaggtaatcttgtgccaaggtcttcagtaggcctgctccatggtctcccttctccccagctatgtgtgatcaagcacacatcacccctctgactggagtttcctcatctgcaaagtggaatcattcttctcacacactgagatgagtgctgagtgtgccatgtgccatggtttattgtgtgtgtgaaagacaaagagacacacagagagaggcacagagacacacacagagagacagaatgtatctacactatgtgtgtatgagctcatgaaggacacaagagttatacccagaagatgctccaatgtgtaataaggacacatgctccactatgttcatagcagccttattcatagtagccagaagctggaaagaacccagatgtccctatacagaggaatggatacagaaaatgtggtacatttacacaatgaagtactacaccgctattaaaaacaacgaatttataaaattcttgccaaatggatggatctggaggatatcatactaagtgaggtaacccaatcacaaaagtacacacatgatatgcacttactgataagtggatatcaacccagaagctcagaatatccaagatacaatttgcaaaacacgtgaaactcaagaaggatactttggtcctccttagaagggggaatacccatagacagagttacagagacaaagtttggagcagagactgaaggaatgactatccattgactgccccaggggatccatcccataaacaaccaccaaaaccagacactgtggtggataccaacaagtgcttgctgacaggaacctgatatagctgtctcctgagaggctctgccagtgcctgacaaatacagaagtggatgctcacagtcatccattggacggagcacagggtccctaatgaaggagctagaaaaagtacccaaggagctgaagaggtttgcagccccataggaggagcaacaatatgaactaaccagtacccccagagctccctgggactaaaccaccaattaaagaaaacacatgataggactcatggctctagctgcatatgtagcagaggatggcctagaagaggcccttggtcctgtgaaggttcaatgccccagtataggggaatgcctgggtcaggaagcaggagtgggtgggttggtgagcagggggagggggaagggaataggggattttcagagggaaaactaggaaaggggataacacttaaaatgtaaataaagagaatatctagtagaaaaaaaaagaaaaaaatgtcttaataaaaagaaaaaataaaaataaataaatttaaaaaaaagaaagacacaagagggcattgtgaaccttgttcctttgcgagagcactatgcaaccctaacctctgagccatctctccagtcttggatacacttattttaaacctttccttgagaccttggcttcttacatcgaagctcgaagatgttttgaattttcttacatatggatactgcatttgcttgtcttttgggcacactgagaagtttacacgtaggatggaaagaacgttggactgctaagaaagtttatttaagtctcacgagacctcttcgatggagcccttttgaggtttctctctgggcaaacctggccaaggttcaacttgaagagcacacagaaacaagcacctccctcgaagctgggtctccactctgtgacctctcttctgctatgcaagagcaggtgggggtagacagcttgcaggcgatggaaaagcttcaactgagggagagaaaagggggactcgttttctaagggatggggcagagcctctgcccctgcttgagaagcctgaagggaagagcttcctcgttgctgcgttgtgtttttcttcctgcttctagactgtaggttaggagttagcctgactccagctttgctgtatgcagctgtgacttcctgtgcccccccccacccccccacccccgcaggagggtcctctttgggacagcagacccatggatcagacagacctcttgctacctagaaatgtgaaactggtctcctccccccagcactgcatcctatgctcttctccagggacattttcacaccctcacccttgcccttttcttatgtgggggacacagcatgccatgccttagggtacagccttgggatggtgaggacagactgtgagggttctgccacccagccctctgtcctcctgaagtcttttatctcctttgtgtccagtctgcagccctcctcctgttggttgtaccctgtgggctttccacccccgctgtgtctgagcagccagccgctcttgtggatgaccttaggtcactattcaaggttacagctctgactcccagagggcttctggagctgagaatctcatacagctggaaaagccattcttaggtttgcactcagcttggcctctgcagaggtatagaaaatattttcgtctgctgtcctgttgcctctcacaggggcagtctctgcagcccagagactccctgcctgtgcgatgcttagtgttggttgtcaacttgacaggatccagaattggctttgtctgtaagggagtttgtggattaggttaacagactaacgtgggaagacctgtccccccaccccgccccccccaactgtaggagacacactccataggctgggcgtccagactgaatgtaaagagaataggagctgcatgccacatttatgtctgaagcttcggcaggaagcttcctgactgcagatgccctctatcttgtgcttccttgggctcctgcctcttgctttcccagttaggacggtaatctcttgaactgtaaaacaaacaaacaaacaaacaaacaagcaaacaaactcttccatctttgaatggcttcttcttggatatttgatctcagcaaggagaaaagtaattaacataccaaccacagctaaggtagcatcctaatgcaggcagtgccctgctcactgataggcgctgcctttacgatcacataggtcctggaggataagcaggcgccgagggcagttgggcaggagcagggttcgtggcaccagagggctgggagacatggtgaagcctggagaggagatctgggtctttggcgggtgagatggatggctctattgttttgcatgaggtcgttggaatggcgttccccactggcacaaatggaaatgctttgtgcaaattgccaggaagccttgagcctgcaaggaaaggcaccaggcctggtgagggttccagcatttatgggctagtactagcctctcagccagcatgagctacttgacctaagtggcagagctacccaagggagctgtgctagtgtgctctctgcctttgaacctgtatcccaaagggcagagggaccaacctcttagatgccacagaactcacggtcatctgaaagcgagggtgagaagtcattcaaccaggaacaggaatcgacagaactggaataagaagaggcttgtggttgctcttccccacctcccaggtagtaaatagaaattatatgactgacgagttttttaatgatgggggaaaagcttagtttaagttatttatatagacattctcacagaggttggaggacacaggctgttttgaggagcgtcctggggcagcaagacaagtttacttaagaatccataccactgattctgtacttagctttcaacaccttgtttagggagcctgaatgggggtttgaaatcagccgagctacaggactgtcttcccaagaaagctgcttttggaatacttgccagcgtgacaaggtcataggagctgtctctccttctctccttccccaagctgcttcaagaggcagggagagcacccaggctagatttgactcctggagtgtctgctggaataaatatttcccagagaccattctctaagtgtcaaactgcagtgctctgtggactcacaggaaagcctcaatagagactgactcccagcttgtgcctagtctggaactttcggtgggtcctcagcttctctgttttgccacaagaacttgcgaagagtgattgctggattgtcaccaggtggcatttctcattttccatgtttttcactgcaactcattcatataccatgttctacagtgtgagttgcactgaaaaaacatagaaaatgagaaacgcacagtgtaaaacatggtatatcagtgagtttcaatggaaaatgagaagcacacagtgtaaaacttggtatataaaggagttacaatgggaaatggaaacatcctgtgggtttgtcagttttttttttttttaattaccgggaaagtgattgtttttagaaaattaatagctacattcactttcgcgtctcactaggaaaaggactccctgtgtggttttggagcagtaaacaagtctgccatccagggtggagtgttcttccaggcccagctgcttttgctggcttccatgctgggatcccaccagctctttgggcttccagcctgcagggagcctcttgagtgcttattgcgttagcacttgcctcctctgggatgtgtgagctgcgctttgggccaggaaggaagagaacttctttttcataaacgggaggtgaacaagagaaaatcagtccatagcgagaacagtctttttcgggtctgactggatacttctatcctgcgggggtataattttggctgacagcctgctggctttggtcaggcacgtgggatgtgacctgacatggccggggcaatcccagggacagaaggtgctgactgtggtgctatgcttctcccctgtacctctcctccattctgttggtacaaagaaatctagcttccagggcggtcgacttcaatccgttcttttaccaacttccccaatctccagaaggtttatttttaaattatgagcattgcgtgtctctgcgtatggatgtacctgtgagtggaggtgctcagagactccagaggctttggatcctctgtggagctggagtcacaagtgtgacagtcctatgtgggtactgggacctggacttgggttctgtgcaggacccgtatgctcttttaactgctgagccatctccttagtccctaacttcccttttgaacaaatctgcttctgtttcccttccttcccatcgtctgcaccggggaatggaactcagtgctcacacgtgctcagcataggctgtctccactcagcctagtcctcttataaaacaaataagcatttaaaagcaaactagctcaagaggaacggtaataacattattgtgctgatgggggaaatcttgatttgggagacactttatattaggaagaatggaaattatcgtggtaccaaggttcctgaggagcgctgggtaagcgccaggcttttagagctagctcacgcttgagttcacatccggctctaatttgtttggttgaataactccgagaaaaaaaaaacagcttaactttcatgtgactcagtttccttgtatggagaaagagagctcagagcccacagatcgtttggcagttgaagtttaagtcttgactgttgttccccaccccacgccctacccctgccaccctgagagacccatctgtcaacagtactgtgtgcagcctatggtggtaaaaggtagtagactcttcaagaagtaaagtctactgggaggtctttaggtcattgtgggcatgttcttgaaggagatattgggattttagtgtgtccccctcccccttcctttcctctttctccctgtcaccctgacatggaaggcttcatcatatactctcactgtgatgtactgagcctccactacaggtccagagcaacagaaataaccatgaaataataaataagtatgaaaccaagaacccaaaacaaaccttttcttttactacggtgattgtctcaggtagtttgtttcggtgacagaaagctattacaaaagttcttctgtctgaaggctcggaacaattctgggtacagggcatactactgctgttagttattgctcttataaggcaggaagaaaatgagaaattgagttagggaaccagccattttaggctgaggtggtacaaggtgatggatcaccctgatgctagcaccatgctgggagaggcttcctgtgctcacactgggaagcgagtgtggctggagggggaggggggtagcacatagcaggtgggtggtgttggttgtaccaatgatatacggttggcctgccttcttctaggtctctctcaacctcaggccccagtgaatgtctggacctcaaagggcagcagctgtcttgtggttgatcatgcacccttcttagatctgcccccgctattgtgccggctagtgaccacaaagcaggtggattgctcagagcccccacagacccttaggtcacatttccttagagccaaagatcagatcctgcaaagtacctaggacaaactggcattttgtgttctccttcctgggaaagagacccgtgagcgcctgcctctgctaaggagtcatcagagaattaagggtgtgagccgccagtggtagggtgcttgccttgcatgtgtaaggctctggcttctagccacagaacagtgtgtaaacatttatctctaaaactgtctgttttaataaataaagttaactgtgtgtgcaggtcagtgatagagcgattgccttatatgtgtgaagtctccagggtgcaatacccagtgtagaaaaagaaaagggcagttatggaactgtctgcattcactctttgcccacctcttagcccattttctgtaatgatagctgctatctatgggacgcctttaaagatgcttgggacatcagtcacagttaggacctgcagtccccttagtgctggactcttttataaggtcatttattccaaagcatggggagcctattaggatcttgttacattagcttttcttgggtagatatgtctgcttgcttatggtagatggggcaaagcaacagttctactccaggctagtgtggtgaaataatgtttattagagtnnnnnnnnnnnnnnnnnnnntagtgtggtgaaataatgtttattagagttatttatagaatcatgggagaggggtttgttacaggagcagaagcgatcccccctccaccccaaacgtttgccatcactgaaaagtgccacttcagcgtgcatggctacttttcaaactctatacactgctagcaccctcaagatcacaagcagctaggggagaattgcataatctgggtctgggaaagggggtggtgcaggagggaggggctggggtctctagtgaaggtataaaattactcctttctatgagagaacagtagggccaggccttgagagtgtcctgtaggtattcacagctgctccagttagcggggtaatggttgctatgcccaaaggacattgttccacaacagatcctcatctttgctcagacccttctgggtatccagggagacatccctctaagggataaaggctgaggtcagtaccttcatcacaggcaacacacctcaaggaaagcacatttgtcttctgaactttatggcaaaaagcagctttgggagcttcccatgttgatatgtggctctcaatactttttttctttttcttttttcaagactggatttttctgtgttatagctttggctgtcctggagtaaaccaggctggccttgaactcacacagatccacctgcctctgcctcccaagtgttggggttaaaggcgtgcgccaccatggccagatgactcaatattttcctcaaagctctttgctaaaggtcacggtcataacattacatgatggtgtacttggtttatgaccctgcccagcccatttctgttgcttccgttctctgagggttataaacagcagaatgagtacatttcatcaccaaggaatcaggcttcatggttcagttactggtcccctgggctgtttcttcaagatagggtgcaggacctgctgtgccttgctgggagagaaagctgtgtctaagcaaaccttgagctctagtggggtggatactaaagaggatgagattctcagttagtgtttatttcatgaacatggagagccaaagtcagcttgttgtttcctaaacacaacacacaccaatcaatatgattcctcccttgggctagcatttgggaatgactaggagggaaagaagcttttgatacagtcattaaaacaacaacaaaaacacaaaaaacaaaacaaacaaaaaaacaaacaaacaaaaaacccccaaaacaccccccccctccaaataaaccagctttgagctagacatggctgtgcacacttgtaaatctaacacatttgaagtgacacaggaggtggtgagttccagtgtagcctaagctatttggagagtttcaggttagcatgggctatggggtcctatctcaaagcaacaaaaatcactaccactaccaaactttgaaagaaaaatgaatgaatgaatgaatgaatgaatgaatgaataacagcttcttcctctcctccctctgaactctatttctagctgtttcttttttggaactcatctgagactctcaggctgtagttgtttgggggtggtggtggtatgtacttacattgtgtgactttaggcaagtgtcaggttgactgcagaacttgtagtagggttgtgtctgctataggaaagttttgctatataaataggccaccgtccttctttctctaaactgctgcccctggtctgcagggtaaaggctgggtttcaacaccactggtcagcaagcaggacacgccatctctctgagcgctgcccagggcataagcgctagggctgtgaaaatggagctgaaggactgctgatcacagctgctgtcttagctgtgggcaggctccccagcagagaggggtgtttctgggccctagagtctatgggaagggtctgggaagtgttctttcattgttaactcagggaaagggtagaccagtgccactgaatgccacctttgtcctctttacagcttcagggagaaaagatggaaggggcactggactgagcggggcaggagtggccagcagctgggccaatcacagcgtggatgggtatgaggctcagcagctggaccaatcacagcgtcgatgggcatgaggctcatttgcattcctttgcgggatggcttcagaagaaacaaagagctccttgaacgcaggctgagaaggcggctgtattttcattctggtctggtttcccagaggcatcttgttgaatttagactattttgaagccctgtggataggcaactacgcttttcaagggcttggggggcttgaagcagggtccctccctgggcctggctctgccttatttagagcatcttagtgcagctcagagggcaggaatgtggccagtggtggcctccctcagcccagaaaaagggcctttctgagttaattaatgtaaaaattgtatagaaaagagggaaaatagctgtgtatccatttaccatgcccaagtttaatgagataaggcattcaaagagccttgatgggcaccacagacttacttctgtcctgtctctgattttcttctcttctgcctccataatgtggcagctttcctatcctatactccaggttttcttggagttcagtgtcatgagctatgattaataaagggttatgattatgaaaggatcctgagttaactcggagccaacccagcttgctatcttttgtttggctggctaaatgttgtgacctgatgaaggattcatatcatgtagatgcaggtgtgtgtgtgtgtgtgtgtgtagccaatctgtcacctgcaccccaacagtacctaacacagaccccttcctgtcaactcttcccaggggttacaggcagggtagtcatctttctgttgttttctcttcccagtcactatgacttcattaagttggcccttgtcccactgaggtctgagtccctaactagaagtgtttcttggtgcccttgacttctgtgaatatagaaggctgggagcctttttttctcctgccagaagactttctttaaaaacctgccttttttgtttatttgtttgtttgtttgtttgtttgtttttggaagccaacattttcagaagtcttaggaacgtgacctctcagaaaccaaaatggttgtgaggacatgataaaccatgatgcacttacatggaaaacatttctatcttgtcaagctgtaaattctttcctcctgcactggagtgggagacagtacctgcagtcggtgacttgtcccatgctccattgtgctgtactgtggctctcccttgtctctaatgacgttttcttttttatgctgtagggagcttctggagaccacatgccgcctggccaatacactgaagagacatggagtgcaccgaggggaccgtgtggccatctacatgcctgtgtccccactggctgtggcagcaatgctggcctgtgccaggattggagctatccacacagtggtatttgctggctttagtgcagagtccttggctgggaggatcaatgatggtaagcatgggtgggcatgggtggagctaaggagtccccagaccttgggctctcagacaagactaatagcacccattagtaagaagttgctcagacaaatgacaggtgccaccagggcaggtccatggttaatgaacaggcctagatatgaatgtgaggcctagaaggcctggcagggccacactgcaggtgaaagggtacaggggtggaggaggcttgaaaggtaccaagattcaacagcactggcaaggaacaacactgaaggatggagaatacctgtctccagaagcctggaggagttgagcatcatgtggttcattggtaagactttcagacctatggggtatagtggcacactcctttaaaccaagcactcaggaggcaaagacaggtgagtccctgtgagtttgaggccagtatggtccatatagagagtttctacatagagataccctgctttaaaagataaactttcagattgcaggtgggtctgagtccctaggaagaaaagcagcagtgtgtccttggttttagtgttgtcagagagctgggtgggtgggtggacagatgaatggatagatgaatagatggatgaatggatggatgaatggatggatggatggatggatggatgaatggatggatagatggatggatggatgaatggatggatagatggatggtggcacactgtctatatagcttgagccttctgttttccatatacagaccctggtcaggctcctcacggaaggttacaggttctggaagccactgaaagtttatatgtgtcctgttttttttcttcttcttcttagtatacttgcagttgctcatttcaagagaagtacaatgaagtgtgtgtgtgtgtgtgtgtgtgtgtgtgtgtgtgtgtgtgttagaattgagctaagaccaacacacctccatccttgggtttgtgagacagtattctcactggcctcaggcttttggggcagggattatagatgaactttgcccatcaaatgcaactgaaaatttcatttttcttatatatatatatatatatatatatatatatatatatatatatatatataaagtttattgattatgtattaaccttcatagtcttaaaatggctgcataagatttcctacccacagaaccgtgccttccatgggcagagataatgttacttcctcctttccactcttgatgactagttctcttggctggctctggttgcaagtcctgtgaccatgttgcctagtggtgtggtgaactggcaagtcctatggccatgttacctagtagtggggtgaactggcatgttcatctttgtgctgatctcagaggaagcactttaggttttttttcagtctgagtttgatgtccgctatgatgtcagggcacggcacagatgcccctttcagtctgagtatgatgtccgctatgatgtcagggcactgtacagatgcccctttcagtctgagtatgatgtccgctatgatgtcagggcacggcacagatgctcctttcagtctgagtatgacgtccgctatgatgtcagggcatggcacagatgcccccttcagtctgagtatgatgtccgctatgatgtcagggcatggcacagatgccaccttcagtctgagtatgacatcagctatgatgtcaagcatggcacagatgccccttttcaggttgaggatgcttcattggattcctctttcgttgttttatgtttctagagtaaacgatgttgaatttgtcaaatgctttttcttcatttgttgaaacatagacttttttctttattctatcaatgtggtgtaatataattatttctgggttctgcttgctgaaccatccttgctttcctgctatggggtacagttttgagactagcatggcattgagggcttctgcaccattgttcagggaggatatttattcacctatagttttcttttagtgtttttgtctggcattggcatcaacacaatgctggcctcataaaatgaacttagaagtataccttccttccatttttgaaaggttttgagaattggtgctaagtaaataggactccattgtttaaggatcaaggtgttttataaatatcaaatctttacttgcctgtgacagtctggtcctggtctttttttgaggtgactattgcccctccccacacactttgttttttagctagggtcttactatgtagctctgactgtccagcaactcactatgtagatcagactggcttcaactttcagagatcagcctgccaagttctggtctcgaaggtgtgagccaaaatgcttgactactgtttcctttaaatttagaaatagacacaaagaattaagtgatttactccagatcacagagctggtaagtaggaaagctggaattttccacaagagctgatgctgtagcatttagcaggctactcctttctctcctgctcctgtgaccatagtgactaatgtttgctaacattctctgagatgaagactcacagctgaccctaactggctataggatatggctatttggtaactgggttctggggaagcttccagaattggaggatctctgaataaacagtatgagagtgtaaaggttggctggttatggggctcaggagggcttctcctgcagctactcttcatgattggcaatgtgtaagaagaacctgtgtcttcagtcatctgggaggtgatcctgggaagcgccattgacagtgggccgtagagctgggaagaggagcccaggcaggactccagagcttcagcaatggatgacccatgcgtcagagtaaccacacgcattgctgatttatattctgtttctagagagcttctttgtgaagacagttggttggggaaactttccagtaccttggtcctggaggtgggataagcccttgatacagagatttaaggtcctggtgtgttaattatttttgtagcattgtgaccaaatgcctcataaagacatattaagtaaggaagattttattttgggttagggcttcaggggggtcagtccattttgtttggctctgttgattctgtgcccacagtgaggacacagtaatgggaccattaagcagaggctgctcattgcatagcagacagaaagcagagaaagagactctctctgtgtgtgtgtgtgtgtgtgagtgtgcgtgtgcgtgtgcgtgtgtgtgcagagtacaaccttcaactgcatgccccaggtaacacattatagccaggttctacctcctgaagttcccagaaccactagaaatatcaccactagcttggggacctgtgggagacacttgaaattcaaaccataacattcagagatgtgggaagcccctataggcagtatcatgacagatgatttactctagactcttacacatagacgactgaaattaatcacaaatgggattcggctggcttatccctgtgaggtagtgtgaagggtagtccctcagtcctatagtctctctcacattctgccctgggcctcagctagcttggctgtaggagtttggacattcagggagaatcttgagcaaagcctgcctgggtccttgaagagagtgtatgtgacaggtgagtgctcccatgaaggcaatgggagtgctccgctgaaagcaatgcttgaacacagctcctggcaccttcctcgagacagtggttctattctctggcctacagtcactggcagggatggctatgtgaaaaccttggaacttggtctttatctcttggtgtttctctgtcaagttggttacaataggcaacaataggcaatctgtccatccctcacttggagaaagcccctggggcaggtcagggagtaggatcctggctgggaaactgtctttatgctgttaacttgtggaagaactgtttagtctcaaggtaattttaacgttcccccattcccccccacacacaccccgcaaacacacaaaactcccaatcttcagagttgaggaaagatggggcacttttatgtgacacctgagcttccatagcaagcagacacttgcttttttttctgttgcttcttttacttgattggacttcctctgtcacactcttaggcctggaacatgcagctccaagtcaggttgggctgtgaaggtctacactgatcagatatgtctgtgttgtatcccttagccaaatgcaaggctgttatcaccttcaaccaaggactcaggggagggcgtgtggtggagctgaagaaaatagtggatgaagctgtgaagagctgcccaacagtccagcatgtcctggtggctcacaggacggacaccaaggttcccatggggagtctggatatcccccttgaacaggtgggtttacctcatgtggtgtacagggtgaggagagattattagtagatctcctgggtctgagaattgttaggctctcagtcaaaacttcttagagggtcccctcctcccacatactcctcatttgcctgcctttctatgccctaccagggagtggagcccagagtttttcatatgctaagtaggagcgcaaactgcaggctgccctaccagcctcactccttttgtggctttgcttttgaaactgacagagaatgccacttcagaatcctgacttcagctagggaaaaggtagtgtccagagccttagtgcatgggagaggctagatgtcttgacctggtgatgtgcttctgtccctttcaggagatggccaaggaggcccctgtttgcacccctgagagcatgagcagtgaagacatgctctttatgctctacacctcagggagcaccgggacacccaagggactcgttcatacacaggcaggctatctactgtatgccgccatgacgcacaaggtaggagcccaggggaaaagggtgaaggatgcctcctgccagggctctggcagagtctgggtagggcaaggagaatgcacagtgatggttagaatttctgcagccacaggcttgtggtgcagatgtttgctcgtagcatgctcttgagcaggctgctatgagtcgtgatgtgtgtaaaagaaagaagaactggcatgcatctgagcctgctgtggcccagcagcccctgtgctctgttccaactccttcttctggaggtgtgggaatggagccctggctggctgcattatacaaagaaaggatatgaacagggctggggtggtagaatgcacgcttacgatgtacaaggccctggcttccatctccaggtttgcagaaaaacaaactcaagcctgtcgcaggatatttgatcacgctgtgacgcccaagatcgtgttgtgtactggaaaaacctctttcagcccttagcacatacctttaatccctctgactggaatagagacatgaccttagtatatacctttaatcccaaacaatgaaggtaaaattagtttgtggaaggaaggaccatgtttgaaaataatgtctaattgagtagcagacaaagtaacaaatcagaaagatgtgacagcataggatatgcccaactctcacgaggagaggaaaaagaggctacttaagagagagcagcgcagagaaggagaggagaagcaggcagttttgccaggacagctagacagagtcaggttgcaaagagaacaagctggatgcaggtgaagacagaacaagccagggaaggagaagaagccagaagattaggacatattgtcaaagttaatttgaggccaagcagagcaatttaggagaacccgagagaagccagattgaatcagtcagtttggagagtagtttgagccagaactgctgagttgaccaaccagccaggggtcagaaagaactaggaaaacattcaaggcttagataagattgtagagaggctagaagctcccaggactaggcctagattagcagatggaggcagtaagtcttagatgatggcagtcacccaggcaagtaaaattacattttcacaagccaaatcctgtcttggcataaagaggaatacattcatgattacatgttaagtctgcactttcttccacttagaaggtcataattcatcctttctgatttttacgttttgtttggttgagttattctttttagtttgtttttattttatttattgttttttatacaatatagtttgattatattttctccttccccaacttctctcatagcttatctacctcccaaaccaaccaactttattttctctctttttaacaaaggctgaaaacaaaaccgagaaacacacacacacacacaaccccacaaacacaaaaatcaaaacagacaaatgtaagaacaataagacaaaaatgaaaaaacaaaatgaaaaatccacaaaaatactactgactccatattatacttgtaaactacgcctgggcatagggtttactctggagtgtggttgatatacccagttacactctactgtataaaactgcttttccctttgccagtgggtgtcaattacagataacttctttgttaggggtgggacaccttgtggtgttttgaatgggagtggttcctttagaatcgtgtgtttgaatacttgaatacttagtctatagagagtggggctattaggaggtatggctttgttgaaggaagtgtgtcactgtaggggggcaggttttgaggtttcagaagctcaagccagttctcttcctgctgcctgctgatccagatgtagaattctcagctacctttctagcacacctgtctgcctgcatgccaccatgacaatggactaaactcctgaactctgaactgtaagccagccccaattggtttcttttgtaagagttgtcgtggttatggtgtttcttcacagcaataaaaccctacctaagacagatccttgtgtactttgccttcccagtgctgggactcagcctgtctagaacctgtgcaggtctagtgcatgctaccacagtctctgtgagttcatctgagcatcagtcttgtgtctagaagacactgtctccttggagtcacctattccctctggctcatacaatatttgtttttgtttttgttttgtttttgtttttgtttgagatagaatcttactctgtaacccagactgatctcttacttcagcttccttagagctggggttctagacatgtatcaccaaccctggcttcccactgatcccgaaaagaaaagaaaaaaaaattgtgagtctctaaaacaattagtactactaatttcaaaaataaaagtaaaaataaaaacactttttataaagaaatttgattattgagtggaaattgcagtgggccacccttgagccacattaaacgacagatcatgcttttattctgataaatatatagagaaagtattgatgggtagaaggactatgattgaacatgggtccctggttgccccagagagtggctgacatttcccaggtagggctgagtttctaggttccattggtgggctgtatgctctattcctaaagctgaactcagctatgactagtggcaacagcaaagggaactatggggccaggagacttggaaacccaagtctcgatgaggagggcttagacatcgttctggctagtagcaactttccttggcttggtctcttctatcataaagccagagttccagccaggcttctaaagagagacttgaatcccagaaaaatcttggctggtgtcttaatcactgttctattgctgtgaagagacaccataaccaaggcaactcttagaaaacatttacttgggtgcttgcttacattttcagagtggagtccgtaattatcatggtagcatgcaggcagaagtagctgagagttccacatccaggcagagagagagagagagagagagagagattgagagagagagagagagagagagagagagagagagagagagattgagagagtggacctgtcatgagtttttgaaacctcaagcctacgcccagaagttactaagcattcaaatatatgagcctatgggggaaattctcattcaaaccatgacattccactccttagtcccgatcggcctgtagtcatatcataatacaaaatttattcagtctgacttcaaaagtcctcatagtctatcacagtcttaactctgttctaaagtccaaagtccccgagtctcatggcattctcttaattataatcaaaatcaaaaagtagatggcatacttccaacgtacaatagcgtagaatatacattgacattctaagaagggggaaaggagtatagtgaggaaatactggatgaaagcaaaactcaaccccagcagggcaaattccaaattctgcatcactatgtctgnnnnnnnnnnnnnnnnnnnnattccaaattctgcatcactatgtctgatgtcaaagtgcttttcagatttccaactcctttcagccttgatgactgcaacacacttctctctcttgggctgattccactccttgctagcagctctctttggcagtatttcatgtctggctacaccaacatctgggggtctctaacacaatccaggcttcactatcacagtttcatgtaagggcttctttgggcctccattcagggaaacccctgacatatccctagcctcagaagctttccttagctgggggtgggatggggggagggattccccaacccctttcttatatccttgatgctaaaaccagcatcatgtggatggctgaagctgccaaattctgctgcttgctgaagctggaacctggctccttttttcaattacatttgtatcggctttctgttgttgatggattcctttgctgcttaattccttttttacaagttggaagcttatctgggtggggtcttgccctgagcctgtcactctatttattccatgtagcaccaggcttttttatctcctggagcacaggacttggcttgaacatcaccttttctggtgctttcccccctcaaactatgcatttctaattttcctttgttcagcttgctcctttttattatacatctatataagagtgattaatgaccacgtggcagagtcaatacaaggcagtcttgaaatctcctctgccaaagcaactcttaattgagtctcagatagacgagggttgaaagaagccacttttcaccaagctatcgcaaggatggtcactaagccacttactaatattcttcccttctgaaacttcttgagatgggccccctccgcaaataaccctcagcactgtcttccatgctcctactagaatgtctagttaaagtctgcttaaagtgttcaactgcttttctagtccaaagtcccagagtcttcaatattcctccaacaaacagcatggtcagacctgtcatagcagtatcccagtccctggtaccaacttctgtcttagacacagttcagtaactgtgaagagacaccacaacaaaggtaactcatatatacatgtatacatatatacatatatacatatatacatgtgtaaatatgtgtgtataaaagtgcttaattgggtgctcacagtttcaaaggcttagttcattatcatcatagcagggagcatggcaacagagcatgcatatcactgggagaagtagctaagagctttatatcttgatccaaagagagggagggatggagggaggaagggagagagagagagagagagagagagagagagagagagagagaggaagaaagaaagaaagaaagaaagaaagaaagaaagaaagaaggaaagaaagaaagaaacaaagaaggaaagaaggaaagaaagaaagaaagaaagaaagaaagaaagaaagagagtaggggggagggtgtgggggacttttgggatagcattggaaatgtaattgaggaaaatacataataaaaaaaagacaaaaaaaagaacaaaaaaaagagaaaaaaatatactccaacagggaaaaaagaaagaaagaaagaaagaaagaaagagagagagagagagagagagagagaaagaaagaaagaaagaaagaaagaacgaacgaaagaaagaaagaaagaaagaaagaaagaaagaaagaaagaaagaaagaaaggagagaaaagacagagaccagagacagagactgcatgctgggtctgatatgggctttttgaaatccccaagctcacactcagtgacacagggccgtgccaactccaatgaggccacacctcttttttttttaatttaaagatttatttatttattatgtaagtacactgtggctgtcctcagacaccccagaagaggacatcagatctcattacggatggttgtgagccatcatgtggttgctgggatttgaactcacaaccttcagaagagcagtcagcactcttaaccgccaagccatctctccagcccctgagccacaccgcttaatccttctcaaataacaccacttccttataactgcacattcaaacacatgggcccatgggagccattcttattcaaactaccacaaggtacagagatgcaagaagcatctttttcaatacttaagagttttttttttgtttgttttgttttgttttgttttgtttttagagcattgggagtagagacttctgtggctaagattaaacacaagtaggaacagcatgacagatgtatgtctttctgctcatttagtgttggaaactttttctatgctaggtgtcacactcaggccttgagtataaggaggcctggggtgttcccaagagcccatgcagctccatagcacactctctgtgtctgttggagtgaaactcttgttcccatctaggtgtgcccagctctgctgggacctggctggtttagtttgtgccaacgctgaggctgccgtgtctctgtgtcctcagtggaagatgttagagatgtccatactggggcttccctgtgctcagatgacagtttgtgccagggtccttggttcaagtgtacatgttttgatatgcatgtatgtgttcacttgggggaatgtttatatgtgtatagatgcatgtggatatatacaaatgagcatatttccccacaggcatgtgatcatgtgtttatgggtgttcccatgcacatgggtgcatgctgatgttgttgagactgttaggaaagaagattgttggctgtgaagggtgatggaggtgtgagccacagtgggctatgcaacagagtcgtagaccttcctggctcttgagacttttggagaatgacagcacacaagcccagaatttcctgtatggaaatatggggaaagaaatcttcagtcccagggcagacaatttggatctgaattacatacacaattgttttgctcttgagtgcttaggggttttaagatgagagcatcctaaaggggccttatctggcatcaatgggaggggaggcccttggtcctgtgaaggcttaatgccccagtgtagaggaatgctggggcagtgaggcaggagtggatgggtgggtgggtgggggagcaccctcatagaagcagggtaaggggggatgggataggaagtttgcagaggggaaaccgggaaaggtttaaatatttatattttatatttatatttatatttaaactgcccaccatttcatgcttcctgtccctataatggaagctgccatctcatatttatttatttatttatttatttatttgtcatagttacatttatttgaaatgacatatacatatatgtatgtgtatatatatatacatttatatatatatatttgaggcagggtcttcctatctatgtagtagtcttgactggcctggtatttgctatgtagatcagagagacctcaaacacacagaagcttgcctgcctctgcctttcacatgaaaatatttaaaggtatatgccaccatatccagccaacctctttttaaaaaatctacaaatcctaccaaattccaatctgtgtatcaatgaattactataaaacgattcccctttgctaaagaagcggaatgtttactggccttgcagaagccctttctacaatcccatctttcataatgtgatatgtgactgtcccatgtttctttcgaggttcataccaaagcatatcctaggcataggtatttttgctcatcacagtatctgggtgccttctttactctgcgggttccctttggtccctttcatttccttagagtttgtctttgtcagttggtcatgtgtcactgcgtccctgagctttgttttcctcaaatggtcaacaggatcccaagatgtcccttcagcaaggggaagcaagtgtcccttgcatgcttacagaagctgatggtgctcagtaggtacttgcatttgatttctagaatgttcgagtttttagaatgttaaaaaaacaaaaacaaaaaaaccttgtggtataaggtagttcagaaatatgccagacctttttttcttaatcttgatgctacagattaaatttagggcttcttgcatgacaagactatgttctaattccaaggcacatatccacttcaagttgccacaccttaattgtatactgagattaaatggcatacatcagtgcatacatggttcaggacatggactgtctttagatcacacatgacctccagagcaaacttctgtaactcagcattatttggcttgcaatcattccctgggctcatgtaccatgcacagtttggtacttgtaatggccacgtggtcacggtcactgtctgtgtttggggttctgtcttctgctgggctctgtggaaaacctctgcagccatcactcaccttactcctgacagctggggtggctgtcacagttactgctgtgcacatgtctgtgtcttagtgtgggtaggaaaagagtgactccgggaagacaagctcttgagggtcctctcctgtgtctgtagctcgtgtttgactaccagccaggtgatgtctttggctgtgtggctgacatcggttggatcacaggacacagctatgtggtgtatggacccctctgcaatggagctaccacagtcctttttgagagcaccccagtttaccctgatgctggtgaggaccaagaattctggtgagactggtttgaggtagtaggggagggatctcaaggttggaggaaagagtcacagaagcctggaggcttgcatctggcaaggggacagttcttgtgtcccattgaccagaagccaggtagaccctggatatgctaggctctgtgccttgctagatgaactggagcctaaagctacgtgcagaaagatcagagggagttcgaccaggagcaatctcatctcaaaactgcccatttcatgtttcttgttcctgtattgtaagctgcctgcggagagtcatttcttcagagttccccatttcatttttagagccactcccattgtctacatgtggtctttcctcaaagcctgggccatccatccatctttcccactctcctcagtgccaccgcccaagcttcagaaccatacatggcttgaagccacccttgttaagttgcatctttgaggacatgaccacctcctgctgtctttctgtgtttctctcacgtaatacagttttcccaaatatttactttaatgtagtcgaattgttgctggctcttgttataacatgccacagtgctggggtgtgaaccttttctttgctaagcctcttggtcccccctcagccacattcaaggaagcttaaaggggtgatagcagggacagaggatcattgcttaagaacggcttcatggaacagtgtgatctatggagtttctgagtattaggtgtgagtattataccagcagctatgctgttttcaaaggaagatgagtcattactttagggaccatttaataatttagggaccaaagtttcatgtcacttttttttttaaaaaaacttgcagcagaaacgtctgaagctgatcccgactagctcacgtggaacacctcacgtgatgctgttatctgaggttgggtgtagaagcttttgtatgccaccttgtagttagggagttctctgggacccctttcttcaaggatggtatgggctccctttctatgatcacatgcatagatgcaggcctcaaaactctgagcttggcttgcatgtgtaaaataggtcatgcttggtggactacctggctgactgtgactcttttgtaggtcgttactgggagacagtgcagaggctaaagatcaaccagttctatggtgccccgacagctgtccggctgctgctgaagtatggggatgcctgggtgaaaaagtatgaccgctcttccctgcgcacactggggtcaggtaagcacagtgctgtgtgcctttagcatgggcctggggctttgctcggtaatgctaaactgggtagttatactaaacagggcaggggtggggtggggtgggggcacttcactgtttcagcaataattgctctaaactgatgatcgaaggttgtgtgctagccttgggagctttcctgacagacactgcacgaagtcaggccatggaatgctagggcagagcatctcattttagagcttaagagccagtcaagcgtacagatgccaaggagccaggttgatagaggctttttctcatacacaacacaggtgaccatgacctagatcacctatagaagaatataggctagaaagcagaataggatatggaaggctctctccggcaacctcttgctgtgactcctgcccttaaaggcagtctctttctggcagtgatgagcaagcctgacatgggtccatctatgtacatgtctattccttgtcaggtgtctattctgagttctatggaataaatgtcagaagtcaaaatttcaggtagtagggtaaacacatctttagttttactagattctacccttgctaattgtccaaaagagttgtatgaaaggtatactttctctcttttttaaaaaaatatttatttatttaatttatgaatgctctgcttcaaaaacatctgcctgcctgaagaagagggcatcagatccccctgtagatggttgtgagccaccatgtggttgctgggaattgaacccaggacctctggaagagcagccagtgctcttaacccctgagccatctctccagccccatgtatgctctcttaattacagcagatgcaccatacttgctcctcagaaacttggtgccagctttcagtcctgtactatgggtagcatcctgtttgcccataagtttcaaaccttttgagctctcagagtgcatgtagtcatcatgatgtgcattactttgatggctatggtcatgggaacacagacctttccaggtcccttggtgtagccatcaggaaggtcactgagctcttcctccctaaaaacgtattcctttgtgtttgaggttattttgaagcctgttaacttccttcttgcttttgtgtggtttcagtgggagagcctatcaaccacgaagcctgggagtggctccacaaagtcgtgggtgatggcagatgtacactggtggacacttggtggcaaacgggtgagtgtccctgagggagagttgttccaggcctgaggactaacctgggactggagtgggctcatgcatacctagcaccatggttcgtgctctcaaaagtgactgtgatggtgcccatcacgaggcccatgtcccttcagcattcagttgcacaggagaaggttcagaggtacagcctgtctgctgtctgggacatgcaatgccctcctgagcctcggtttcatgtgtatcttacagcctctgtgtgagctccagagtgagaaggaaatgaggtgacaaactagggccagtggcctaacgagtccccagggcccattctcctttacaggcagaggccctttccttgcttgcttcctttctttttaattttggtgcagtgctggacctcatccatactcaatagctttctgcctcagcaccactgttttctgaacacacacactttctgagaaagaagtggttttttcccctctgtggaattttccttttatatgtatatatctgactccttggggatgttcatgggaaagaggtcaccactatacagtaacagagctgtcaaaagccttatgttgcaagtggccagcatgagacaggttcctataacatctctggtctgttttggaaggcatggggcagagaatttttcacaatgcgcctcatgaaacacgaccatgcgtgctgactgattcaggtgccagagaagtgaccacacaggtttcaccattcattggtcttagcttccagcagtttatttcttccatcttcctgtgcaagtaggtggcttttcacccttccctatttcaaacataggcctgacccagtgagggcctattggacagagggtagtacccgagaggaggagactacagaccaagcctagatgagaacatagtggattatatctgtcccctggctcccaggtcaattggtgtttcttcatccttcctgcagaaactggaggcatctgcattgcaccacggccctcggaagatggggcagagatcctcccgggcatggccatgaggccgttttttggcatcgttcctgtactcatggatgagaaggtgtgagggttttgcacataaggcattgctactcatctggcaagccttctaccccctggtttctgtcctttgctaaggtgcagggtctagtccctggagtaaaggccaggtcctcacacatgccccccagccctttcttaaacaacactgctaatgactgctgcaaaccagggctctcatcaaactttgtcaggaggaaagctctggacagttctatccagtgcttcatatttcctgtgtcgggtcaagccgatagtcaattctttgactttctcccagggctggccaggtctctcatgaatgtctctctccatctgtagggcaatgttttggagggtggagatgtctctggggccttgtgtatttcccaagcttggccaggcatggcaaggaccatctatggtgaccaccagaggttcgtagatgcctacttcagagcgtacccaggtgagcagctagggtagatcccagtgtcttctccagggattcctggagtcttgtttctatagataggggatctggttaaattcatggcagctctgtgaaagtgagtctgtctctggaccctccctttacttctcaggccttctttatcttggttgggagatcgggtgggcatgcggaccctgtgtaagggccaggatgaacatgagtatatccatggctctggcctgggatggacatcatagaagataatggggaagaaatgagtgataagacatgattgggaagctgtcacagaggctgggtgttccatagtttacattcccattcttctcaacgtttcttttgggtcctgggttggaagtttgtgtggctgccgaggtctctgccttgctggaggtagcaactttcagtctcaaggttacagctgccattcatctttatgagcatccctgctgttttctgttttctggacattaacattcttgacatcattcatatgacgtagactccgtgccacttgccctctcattagaccactgagagagatgtttatttgttggttgttggagggagataacaggttaggaacttggactgtgccgggcctgactcagagcccctggccttggatgcctcactactgtgtaggttattacttcactggagacggagctcaccggacagagggtggctattaccagatcacggggcgcatggatgatgtcatcaatatcagtggtcatcgcctggggactgcagagattgaggatgcaatggtaagctaagcccagcctgccttttactttgcctggtattctcatgatgcatctgttgatctcagagtcgggatgggaatgtaaaccccaagtcatctcagggccttttgccctctgttctgcacaggctgaccatcccgctgttccagagactgctgtcattgggtaccctcatgatatcaaaggagaaggtgagtgtccccccttctttctatagtggaggatcatgtgcagcagggtgccccaataaaaagacaacagaatacagtcacagggccttatgggctatactgttaccttcctgatgaggacactgatcaaggtaatagtctaagatacaaaatgcccagatttactgacctttaaggacattcagccataagaaaccatgatatatttggaccctagctgagcctgagaagtctcctctgtttccagtatctctaactggggcactttctaagccacatacatatcctcctgcccacccacccgcttggtttcagcactcgtgccagctctgtagctgctatacctgtgcactaggctatgccctagagcagtccgtgtgcttccctgagatgctggggaaacttgacatcccatagcataattgacatgggaagggagggcagagtaaattaccagaatgttcttaaatcaatgatatatttaaaagaaaatttccccagagccagctgattcccaagtggctgtgtctagaaaggacacttgagtgttgcaatggcagactctgtggcctggtgtgacatggccatattctaagcacctatgaggtcatttctacacaaaatgaccttgtatgccctgtgaagtggcctgggattgagtgttctctctcctcttagggacattctgtgttacagtgtgctccaagtgtcacccgactcttgtctacacttatgtgctgttgtaacacgcatgcttaaccaaacatttaacctttttcatgtcccagctagaaaccaagccctcaaacatgctaagcatgcagtctactaccgagctccaccacagtaccttagatactgcctttctttctctttgatatctttatttaatgtctatggatgttttgcctgcatgtatatctgtgcatcacgtgtgtggtacttgcagaggtagagagatggggtattggatctcctggaactggatttatggatggttattagctgacgtgtaaattctgagaatgggacttctgtcttctggaagagtagccagtgttcttaactgctaagccgtcgctccagtcccattagatactttctttgaactgacttgttgcaaaatttaaaaatcaatcaagtgcttcaaaaacaacatccttagaaaccatagaactgaggtgcctgtggctttgctattggaacaaaggcatgtgggagagctgtttgggataccttccagccgaggcaatgtctagatatcatcaagaagggagtggggtaacagtgggaacagttcctcatgggtaactgtgaaggtacctcatttgcatagggatctggacccacttctggggtccctgcatttgatatctccatagttcaaggatcttcagtgccctggtagactcccaccatttggaagctgtgaaggttcaatgttcccaagtcccaagacagtgccaatacttcagtcctgactgaacccgagagggcaaaaagtgctgaaagtggcctgtgaccccagccaccttctgccttgtccttgggggtctatcagcccttgggtgaaccctagaaaataggaacaaggtcaaggaagctgcattgcagctggatagctttagatgggataggctatgtgttgggttgtgctctgtctcagctgttctgcctgcatgtgggttcttcaagggcactcccagtgtggtgtctgatgcttagcattctctctgagtcctctggcctctgtactccagcatcagctttcagcatcaggtattgccagcccttcagtgcctgcagggctgggagggaaatttacatatagtgtgatgctactggtttcgaacagatttgtacttcatgaataacctattcacagttcttagtgtcaagctgcttgaacacatttggagtttgtcctcacttcctccaagcactcgtgggtctagtttgtcgaggacctgaagctttggctagattctagtgctctggctcttaacctgctcttccacagcccttcatccctgcctcaggaatcagcaatccaggtctgtcttcacagtcccctcagctgctgtggttgtaccagcttgcaatcccaccagcaatggaggagtgttcctctttctccacatcctctccagaatctgctgtcctgagttttttatcttagccattctgactggtgtgaggtggaatctcaagctccactatgttcatagcagccttatttattatatccagaagctagaaagaacccagatgtccttcaacagaggaatggatacagaaactgtggtacatttacacaatggagtactactccactattatcatgaagttcttagttcatgaagttcttagttcatgaagttcttagttcatgaagttcttaggcaaaatatcaggcacattgctggtggttcctcaaaaaattggacgtagtactacctgaggacccagctatacgactcctgggcatatacccagaagatgctccaacatgtaataaggacacctgctccactgaattttttaatacgtggtctctcactgaacctggagctcactgattggctaggatggctagccagcaagctccaaggatcctcctatttctacctccccagtgctaggattataggcatgtaccaccatgcatgcttgcttctttacccaagtgctagggatctgaattcaagttattatccttatgtggcccgttctttactgattaagccatctccccagcctcaggggacaaaattttgaagtaaaaacagctatgtgctcaccagtatgctgatacacaatcttgtgtctatttccaggcagccccatgtcatgcattctttcacagctgagggaacagaacgttaagtcacttgtcccaggtcacacacagccatcagcactgtggctgtgtcatgctttcaaccaagcatcaccacccatgggggacactgtcagagccgctgttggagttgttttcacttcctgtgccttggacatgctccttcagggttgcagtagctgaaaccagttgctactatgaaaccatctcaggatttagaaaccctctgggtttacagcagcttgtaagagggaattcaagacagactcaggacctagcactccccagtctttgctctctttccagctgcatttgccttcattgtgctgaaagataacatcagtgatgagaacatggtagtgaatgaactcaaattgtcggtggccaccaagatcgccaagtatgctgtgcctgaccagatcctggtgagtcaagtccaccttagggggaatagcatcactctctttaaatctctgctttccacaaatgtcaagcaatgttcaacttttacaagcaaggggttccttttatcccaacatcaaaacagtcattagtggtttgggtttcgctgagtggttttcgtgagacagggaaggtccaagcatttggagtttacagcagacacttgtttaggacacagccctaggcaaggctagacacaaggcaaggctagacgacactcttgtactgtagcactcgaacgatggctactggtacgggactgaacggtaaagaaaacataaattctatttagttttttctttttgtgatgttaggtatgtgtttgctttctatcgccgaggcaaaatgcctgaggcaattaacttaaatgatgggaaggttttattttggctcagggttacagtttatggttggttggaggggctgtattttgtccggtagcaacaccttttatcttggtgggaagcatgtggcaaacaaagctgcttaaatcatggtagtggagaagggattgaatatatccttcaaagaccaccccttgaatgacctttctttctctcaccagactcccacctcctaaaagtttcacaataccccaacagcaccacagactgttgacctttaacatagtctttggagaacatctaagattcgaatcgtaacagagttgagcccagagacttctgaatgctgaacttgaactccaccactcagctatgtctcagtcaaactacagattttaaagatttgagagacatggagttctccagtcttatgtggtttctgaacatgtttcctatttcctgtaaaggagtcatttcctgtgggaaggcctgggccacccttgagtctcttcagatttttttttttctttctttctttgctgatacctctccacaatgatttctgggttggaattctttgaggcaagaagggttcatcatcccttcatagtgctcacaatgctggcctatcagttgaacttgtaacattaactatttccagatagggcttcaatctccagcaagtactaccgtctacacacacacgcgcgcacacacacacacacacacacacacccctaccttccaaacattctccagcaagtattaccgtctacacacacacacacacacacacacacacacacacacacacaccgtctacacacacacacacacacacacacacacacaccccttcaatctccagcaagtactaccgtctacacacacacgcgcacacacacacacccctaccttccaaacattctccagcaagtattaccgtctacacacacacacacacacacacacacacacacacacacacacacacccctaccttccaaacattctactcagaggcttttccccaactaagcccgaggcttgggctaaggaggaaaccactcgagcattgtggtagaccaaacaggctcagtggtcacacctggaggcggatcagcaaagcttggccacaggttagatcctgccctttggattgatgtcagcttcaggctcagtttgcagggggattaagaccttgcttggttcatatatcaggcaaagttgcgttgtagtcctctgtgggagtgtcaacctccacaggagaattctcaccccaggccagtcactgtgtcagagggcgctgcccagaccctaacaccactcatctttgccaggtggtgaagcgtctccccaaaaccagatctgggaaagtgatgaggagactactgaggaagatcatcaccagcaggggacaggatctaggggacaccactaccctggaggaccccagcgtcatcacagaaatcttgagtgccttccagaagtatgaagagcagcgggctgctaccaactgagaggtgtgcctctgtgttgttcagacaaggctgcacaggacccctggacgtcctcaggggaagcaacttcaaaagtggcttgtttcttccgaacacatgacccatctactgccctatttgaagctgaagcccctttttctttctcctggggctcagagggctgcttctggaggctgggggaaggcctttgtcatacatctggtttccagaatcaagtcataattggcactaagccagcacagggtgaccagaggtcttagctccaaaactgtcatgctttctccagatgtgtttagatacaaaacacaaattattttttttttgtactttttctatttggggagaatagcagaacatttgagtataatgtgaacatttagttacacacacacacacacacacacacacacacacacacaccgtgggaagaatctcccttcttacctccccagggatgaagataacagaatgcgcttttttttaaaaattttattaccattcaatgtgcttaaagtccaaaccagacatgtttgtgcctctggcacataactctcctgctaatccaagtcaccatgtccaactcctgcgtctatttcatatttggttcatttggtttattttatgatcgaacaaactggacaattcttacattttgtatggtaggaattgcactcagggcctcctgcacactaggcaagcaagcgctctacctctgagctgcacaccacacctctaactcccaagaagacggagtgaatgtcctctcctttacttgtgaaatcatttgggttcgtttctctaagctgtgatctggaaggagtttctttccccaaggtgcctcatagtaggagatcatattgcttcaaacgtgtgaggttgttcatggtagccagtgaaaactcgggtgtctttactaagcctctggtcccatctgaactgagatcctgaagactctgcctgtcctttcttttgtggttggggcagcaagaactcactgtggtccaatgacgatgacacttggtgctcctgagcaaggtctcttttgatgtgccttaagttctctggacattggtgagtgatgcaaatagtgaagtcatgaaaagcttattttgcagctagattgtggctaagcatgggagggctgaaggggaggcagctctgtgagcagggcccctgggggcaaaggaagcctgttctgtctggtccacagaacttagctatatgggtgtttcagggtatcttagctactgcacacttactgtctgtcctgacgtcttgggtaatggggtaaacatgctgacgctcccaggaggcggagcggttgtagtatgaacaaatcttaatagtcctttgttacaatcagcagtgaagagccatgtgatggacgtggctgagtatagttactgtgccctttgaaatggcctaggtttctaggttactgatagaagctctcggaatgatttatagaaatatccaaataaagctttattttgttcactgtcttcttatggggatgtttttggttgacgttattctattttgtttcttcctggttggggattgaatctagggcctcctgaatgctaggttagcactcaatcagacctttacccccaccccactcccaccctagccaacataatcctaagggaaaacgaaaaggggtccatccaactcaaaagatagtccacacacaagaaatgttggtgccgtgtattcgtgtgtgtgtgtgtgtgtgtgtgtgtgtgtgtgtgtggtgtgctttgaggccagaagataacctcatagcaccatctaccttttcttttttaagacaaggtctctcactaggcctgggactcaccaagtagctagtctggctggccagtgagccccgtagattctatctccatctccctagtgctggggttacaagtgaacacctgcctattctattcactcctgcctatttcccctcggttctgaggctagaactcaggtctcatgcttgcaaggcaagcaccttagtgattcaagctatcatggcactgcttctggaaaagccgccatttctgcagggaaaccacctgaccgtgttaagtggctaactctggctgcaggtgtgaggttatgacgctcatttcctagtcacacggggcccatcttcagtaacaagctcaggtatgaccatctgatactgtcagggacaatagggaacacataaagataccatgggagtggattattatctacctcttgcttgataagaaaataaggaccagaaaagaagaaggacccagggattagaaagctacctgcccatttctcttgggacttccccttgtgtctaggtttttgttttcattgaaattttggacaaagaacccagtttttggtactacagtgcagagagaagaacaggctgctggtagagatgggtaagaaggtaaaggtgcttactgccaagcaaaatgacctgagttcaatctccatagcccatatagtggaaggagagaaaagactgctgcaggttgccatctgacctcttgtgtgctgtctgtgcactgcatactcacagatgacacagatacacatatatacaagtggacaaacaaatggcaaaaatgtatggcagtgaaatggctatcacgtatgccttgattatcatgcttccatgaagggcaatcacaggaaatgctggggaacatccatcccaggtgtatccacagaagctgacctgatgaaaaagaggtccgtcagtttcttcaattcctcatttcagagaggtattggaatcttccgagagctaatgttctgtactgtgttactaccctcaccatacccagcagggaacaatgtcagaaactgagacttaccagattctgtgtacaagagaggccctgtggcagggttcacaccctttatagatgctattcttcctagatgacctaggtagagtgcctgaaaatagtttgaatccatgaaccctgggcttaatcacacatttggtcctgcttgaggaagtttttgggtgacacaacacacacacacacacacacacacacacacacctttttttttgagacagggtttctttgtgtagccttggctacatgaacaaattcctcctggaaccagctctatagaccaggctggccttgaactcacagagatctgcctgcttctgtctcccaagtgctgggatcaaaggtgtgtgccatcactgctggaaaacagcttgatttttaaagttatcttactgtgaactttgaggtgctctctgaatgggttattttggaaagaaaagtagcctagataaagtccaaggggagtatcttttaggttgagaccaattgagtgttttccatgtctagattgaagggttgtcttccatttctggaccaaggagatgcagtcttgatgcagaataaaaggccatcttagagatctaggccaagaggatgcctctcttaaagtgccatttaaaacaaacaaacgaacaaacaaacaaacaccaacaacaaaaccgttgccagtcaaggactgaaggagctgaaggggtttgcaatcccataggaagaccaacaatatcaaccaaccagaccccccaaagctcccatggattaaaccaccaaccacagagtatacatgaggggctcatagttctagctatatatgtagcagaggatgacctttgttagcatcactggaaggggaggcccttggtcctgtggaggcttgatgacccagtgtagggggatgctagggcactgaggagggagtgggtgggtcagtgagggagcatccccatagaggcgggggttggagtaggggggttgtggaggagaaacttgagaaggggggaataaccattgaaatgtaaataaaaataaataaaaaagaactttttcagtgagcttcagcttcctctattctgatttatataatttcccttgccatcttgccttcatgactggtatagtgcttttataaaaaggtgtggaagcacctacctgctttctccctttgctggacacagcagagaaactgaagcatgcaagccaggaagtaggtgcttaccaaatgtggaatctgccagtgtcttactttctcgttctccaggactatcagaaactgtcttttgagtcacccagtctgcagctttctgttatagcaatccaaacttagacaatgtttcatcttcatatcgtactgaaaaactggggtgggggagatggcttctgggctgtcagagttctgagactaagctgcctccctctaagtagataaggactacaaaacgaagacattgtgaaagctatcaggtaagctgcgtatacccttggatggctgcttacattctgggggcctgcaacagggccccttggttaccatggagataaccaacagaggctctgggtttctgggcatcttcctctagcacccaagattccttgtctgtgtttgtttggtattaatgaccttcatctgcccttctacagaggagttgccacaggaccccggcttccagcttcttccagtcagtagaagcgcttgtggtttaaatgagaatactccttgtaagcttatgtatgaacacttgaccccagttagaagtactgtttgggggaggtttaggtggtgtagccttttttttgtttgtttttcgagacagggtttctctgtgtagccctggctgtcctggcactcactttgtagaccaggctggccttaaactcagaccccattcccagttagctgtgtgtctgaggctgaatatgtgtttctctcagtttcccactcctactgccaattcagcttgctgccatgcttccccgacatggtagacttacccctctggaactttaagtcccaaataaactttattcccccccaaatagtttctggccatggtattttattagagcaacagaaaagtaactaattcagctatactaaatgtgtgtgtgtgtgtgtgtgtgtgttgtgtgcgcgtgcgcgagactctttttctttttttttgggggggggcggtggtgtgagaccaggtttcagtgtagcccagactgctatggaacttgctaggtagctcagcattcacctcaacttcctgttcatcctgcctcagcttccaaaatactggaagataggcgtgaacaccagacgaagagcatcttctatatttctaaacataaatatttttcaggtttttatttttatgctttgagatatgtagcacaggttgttctgaaacccagggccctcacacccctgtctcagacatgtgcaactttacttgacgattcttcagtgctctggtaatggtggtttagccatttatgtgttgacaatatactattaggatttcagtcttctgaagttggtggaggagacaggaatcctcctttcaataagcccagaagtaggaaagggaagggaatgggtgttagttgtcctcctagatcatggatctctgaggagtctggaaccctactgagagaaccagtaccactagcttctcctgctgtgcagtgggattttcttggtaaatgtcaccagttgagtaacctccggctctctttctctgttcctatgtctgacagtttgagacagcaaacacaccttggaccattttctttcctaaagatggacatttcttagcctaaaccatggactttatcactgggagttaaagactcccatctcacagatttcaatcaattggtgtaataaaataaaagccaggacagtaatcataaaaaaaaaaaacaacaccaccaataacaacaacaacaccaataacaacaacccaggtggtaacttgcttttaaaaagtagtttctaagccaggcacagcagcacacacttttaatcctagcactcaggaggcaatgacaggcagatctctgtgagtttgagaccatcatggtctacatagtgagttccaggatagccaaagctacacagagagattctatttcaagccaagccaaaccaagccatgccagaccaaaccagaacatggtttccagggccctagcatgtagtgtaggggtacagcttgggttcctgacactgtggaaaacaaaccataaaacacaaaaccaaattggcttctgggtgtaattaaacacaagtaatgaggtgccagtaaaaaaaaaaaaacaaaaaacaaaatgtcattgctaagagaacaattgggctggaaagtttcacttcctggccaggtagcaaacatacatatccattccactggtagatatcacctactgagtgtgctaagaccctggctgctgaggctggactggctgaaagaataaatgggacaattacagtaattatcctcagcagcccattttcagcttgtccctttcctgtatacttggcagaacactcatcactcaggaagccagtcttgccctgcctacactggtagcaccctgtctgctctgtgggtttttaactgcctgtcccatagggctacagaatcctactgaatgctgtaaaacaagatgttctgtccaggaataaggatttgggcaggaactgtagttagtgacttgtgggacaaatgaaatggaaggccttggtggatgaaaaatagaaataaagaggaaaggacatgactgctcccaggtatggtggaggaggaagtttattatagatgtgtaggagagcatcgctggagagagtctagtgttgtcatgatcttgaaccatgtgagagagggggggtggaagggagaggggaatcaggtgcacagtcaggaagccaaagatacaaaaaaagggcaggtgaccaaaacgtctgaattatatatggaaaagtttctaggggaagggcagcccagcccctgagatggagagttcagtgtagagggcagggtataacagctatacagtataataggtagggactaagggatgctgggagaacctggaggccaggttaactttatatgttgaatagaaacctctggtatttcaaaccttcaggtttgaaatttaacacatggaacaccagatttgaagccatgcaaagggttgttggtatgtcagatgggatgttctcaggggcagcataaatgtctctaatgactggcttggacatcaggggccattttccttagctggcaagtagctgctgctgcaggcagtaggttggtatccactcctttaaaaaaggacgcccacctctgcatttattttatggcaagatccattgcctgtggccaccttactatttcaggctagaatagcaacagttgagattttttatgtttcacagtgaaagaagagccaaacttcaggcactgtcagggaaacttgggggaaaaagcaatggccagtcctgttaggtttgttggtgagtggtgaagagctttgttgcagtggaggcaacagcagtttttcctccccccccctgctcctcctccttctttgttttcttcttcttcttttcttcatatcctcttccagtcccatgaaacctacttgttctaggctcagttttatagcgtctccctttgtgcagctaataaagtcttcctaattgtccttttctatttatgtttgagatggactttgctatgttgtccaagctgggctcaaactcctgggcttcagtgactctcctgcctcagcatccagagtagctgggaatacattaggataccatcatgcctagccttctctcatcctaagctggctcttgtagttgtttctctcaactgtgcataggttcttcaacattcttgagcctactctcttctgccctacctgccctgaaaacagagcctcctactatgacatggtctttttcaatactgctattccactcaaaaactacttatttatgcacttaatgtaaatgttttgtctgaaagtatgtatatacacatatgtgtgcttggggcccacagaggctagacaagggttttggatcgcctggaaatggagttgtagacagttgtaaactgccacgtgggtggtggaaactgaaccaggaccctctacaagagcaaatgtgcttaaccatttagttctctctctgggcccttctttccactttctagtcatttgctgtcccctttagatggttcatcattcatcagtggaccctgaagcctacccttgcttatcaccccttggtcaccaacctcaggacccctcaagtcctcctactttgtctcttgcccttctctatcctcccagctcttcatctggaatcttacttatccagagttggtgcacatgctccgctggtttactcctatgtcagcacagctttccctgaaggtctcaggatacctagcctgtcctttgtgccactcctttataacagtcatctatgttttctatcttccctccccatttacaaccatgaatatagacacatctgaggacctttgttttgtaacaacccttaggacctgacaggcatttgggaagtatctgtataaagaattgaatcagtatgggattagagggtaaagcttaagactaaattcaggtttgtttctattttgtctaatttaccacattgggagatgactgcataatatcatgtgcttctttttccatgctgggatggccccatttttgttgtgataaatgtcgtctgtgtagacgagcgtttcagcgaaagtgagctgcatcgtaagtcccaggatgtgtagtagtctcacccagtggttcccagtcaagggcccttttgtcccttgcaggacatttgggcaatgtttcaagatattaaaaaaatattatttgtttctaatctcttgtcattataataaatactgaggcaatcaatttatagaaggtttacggtgactcaggattgtaaaggctttaacctatgatcagttggctgctttgggtctgtggtggtacattatggtgggggtatgtggtgagcaattgctactccaatgtggagaaatgggaaaagtaaaagagaaaagggattaactcccataccctcatcaaaggcatgcctccagtgtcccagtagggccaactccttacaaatgccattaccttccagtatcacccatgctgaggaccaaatttttcacaaatttttggtgttccagattaactttagcactaaactaggtggggtgctactgacatttaaagggtaaaggccccaggggtggtgcaaaatatcctatactcatgacaactgccactttacctctacaacaaaggattatctcgccccaaatgttatcagtgctgaggttgggaaacctgagctaaccttgcatggcagtcccatttctctttgtgcaaacagttggtacaatgagacagtaatgctgattggctgcagggctggagggtgatgtgggacaagagagcactaagaccacatacaacaagcagaatggactttaccgtgacttgcaaacagaaaacccctaagtcatattgcataacacaaatgatcgaagctcagcctattctaaccccagcttattcagactcatgtgcttcaagataaggccatgagtgtatctcccagcaattccctgtggacttatttgttttagagatatggccactggctcttccagacactttcctagtttacaaactctaaccgatccgttccaagaccatttctaactttagccctgaatttcatgaacagtcttccataactgaggagctcacaggtcgtctggtgaattccttttatgtaggaagttcagtgtattcaactcttttttattcttcgtgtgtgtgttccgggttgttttggcccatgtgtttcacactgggcataggatacgcataatccatgtaacaggcactggatgtaactggctacttgtgacagctcaggaatgttcacagagcctcccacagacggggatactctggagagttaatgagagattttcagcaatgactcttgagatggattctggatgataaaagtggtttaggtggaggtagaaaaaaaaacgtatcacaaggaaacaaggagtaacatgacaaagtcagagacatgcaatcagaaggggaagccattcaggtctccaggtaggcgccagacccacacagcagttgttacaattacccacgatattatctttataatgtctgtcttcaatgatggaatcaagtaccatgttgccaagccttggattatatataacctgagatccctacagaactgtgttaagaaatctccacttccctcaagcgagaggaaaaagaacattgaggtggcattctatcgccatctagtgccgaaaagataatggcatgtttgcttctgtaaaatcccaagtgaggtacaaaatccagcacctatatcctagagatccttcccaatgccctacttggttattgctgcctgaaattctcctgtccgccctttctcttccaatc

SEQ ID NO: 1503 - DNA, 2513 bp, Mus musculus
gcgtggggcgtcgggcgagatggcggcgcgcagcctcggcagcggtgtggggcgactgctgcgtggcctgcaagggcgctctggacaatcggggtggtcactgagcgtgtcccgctcgaccgccacccgactcccgggctgcgttcctgcagcagcgcaaccaggctcgtaccccgcgttgagcgctcaggcagcccaggagccggccgccttctgggggccgctggcccgtgacacactagtttgggacactccttaccatactgtctgggactgtgacttcaggacgggcaagatcggctggttcctgggaggccagttgaatgtgtctgtcaactgcctggatcagcatgtgcagaagtctcctgagaccatagctttgatctgggagagagatgaacctgggacagaagtgagaatcacttacagggagcttctggagaccacatgccgcctggccaatacactgaagagacatggagtgcaccgaggggaccgtgtggccatctacatgcctgtgtccccactggctgtggcagcaatgctggcctgtgccaggattggagctatccacacagtggtatttgctggctttagtgcagagtccttggctgggaggatcaatgatgccaaatgcaaggctgttatcaccttcaaccaaggactcaggggagggcgtgtggtggagctgaagaaaatagtggatgaagctgtgaagagctgcccaacagtccagcatgtcctggtggctcacaggacggacaccaaggttcccatggggagtctggatatcccccttgaacaggagatggccaaggaggcccctgtttgcacccctgagagcatgagcagtgaagacatgctctttatgctctacacctcagggagcaccgggacacccaagggactcgttcatacacaggcaggctatctactgtatgccgccatgacgcacaagctcgtgtttgactaccagccaggtgatgtctttggctgtgtggctgacatcggttggatcacaggacacagctatgtggtgtatggacccctctgcaatggagctaccacagtcctttttgagagcaccccagtttaccctgatgctggtgaggaccaagaattctggtcatgcttggtggactacctggctgactgtgactcttttgtaggtcgttactgggagacagtgcagaggctaaagatcaaccagttctatggtgccccgacagctgtccggctgctgctgaagtatggggatgcctgggtgaaaaagtatgaccgctcttccctgcgcacactggggtcagtgggagagcctatcaaccacgaagcctgggagtggctccacaaagtcgtgggtgatggcagatgtacactggtggacacttggtggcaaacggaaactggaggcatctgcattgcaccacggccctcggaagatggggcagagatcctcccgggcatggccatgaggccgttttttggcatcgttcctgtactcatggatgagaagggcaatgttttggagggtggagatgtctctggggccttgtgtatttcccaagcttggccaggcatggcaaggaccatctatggtgaccaccagaggttcgtagatgcctacttcagagcgtacccaggttattacttcactggagacggagctcaccggacagagggtggctattaccagatcacggggcgcatggatgatgtcatcaatatcagtggtcatcgcctggggactgcagagattgaggatgcaatggctgaccatcccgctgttccagagactgctgtcattgggtaccctcatgatatcaaaggagaagctgcatttgccttcattgtgctgaaagataacatcagtgatgagaacatggtagtgaatgaactcaaattgtcggtggccaccaagatcgccaagtatgctgtgcctgaccagatcctggtggtgaagcgtctccccaaaaccagatctgggaaagtgatgaggagactactgaggaagatcatcaccagcaggggacaggatctaggggacaccactaccctggaggaccccagcgtcatcacagaaatcttgagtgccttccagaagtatgaagagcagcgggctgctaccaactgagaggtgtgcctctgtgttgttcagacaaggctgcacaggacccctggacgtcctcaggggaagcaacttcaaaagtggcttgtttcttccgaacacatgacccatctactgccctatttgaagctgaagcccctttttctttctcctggggctcagagggctgcttctggaggctgggggaaggcctttgtcatacatctggtttccagaatcaagtcataattggcactaagccagcacagggtgaccagaggtcttagctccaaaactgtcatgctttctccagatgtgtttagatacaaaacacaaattattttttttttgtactttttctatttggggagaatagcagaacatttgagtataatgtgaacatttagtt

SEQ ID NO: 1504 - protein, 707 aa, Mus musculus
RGASGEMAARSLGSGVGRLLRGLQGRSGQSGWSLSVSRSTATRLPGCVPAAAQPGSYPALSAQAAQEPAAFWGPLARDTLVWDTPYHTVWDCDFRTGKIGWFLGGQLNVSVNCLDQHVQKSPETIALIWERDEPGTEVRIYELLETTCRLANTLKRHGVHRGDRVAIYMPVSPLAVAAMLACARIGAIHTVVFAGFSAESLAGRINDAKCKAVITFNQGLRGGRVVELKKIVDEAVKSCPTVQHVLVAHRTDTKVPMGSLDIPLEQEMAKEAPVCTPESMSSEDMLFMLYTSGSTGTPKGLVHTQAGYLLYAAMTHKLVFDYQPGDVFGCVADIGWITGHSYVVYGPLCNGATTVLFESTPVYPDAGEDQEFWSCLVDYLADCDSFVGRYWETVQRLKINQFYGAPTAVRLLLKYGDAWVKKYDRSSLRTLGSVGEPINHEAWEWLHKVVGDGRCTLVDTWWQTETGGICIAPRPSEDGAEILPGMAMRPFFGIVPVLMDEKGNVLEGGDVSGALCISQAWPGMARTIYGDHQRFVDAYFRAYPGYYFTGDGAHRTEGGYYQITGRMDDVINISGHRLGTAEIEDAMADHPAVPETAVIGYPHDIKGEAAFAFIVLKDNISDENMVVNELKLSVATKIAKYAVPDQILVVKRLPKTRSGKVMRRLLRKIITSRGQDLGDTTTLEDPSVITEILSAFQKYEEQRAATN

SEQ ID NO: 1505 - DNA, 72754 bp, Homo sapiens
tttacatcaattataattgttgacatttaaattttattttaacaaatttattttttgtgtgtatttgcaaatgttttttaccctttcttttaaatctatttctcctttttttcatttttcaaactgctcagttttcttaccccttttccccctctactggattagaaggtatatattctgcttctatttgtggttaatctagaaaatttgacatgcatattgatgtaaatgtaaaactgtcctgaacattcgagaaattataggatgctacttttgatttcttaattactttctacactcttgttcaggatttttcttttaccttgttttttttcttaaccccatgatgcaggcgttattgctataatttcatatcactaatgtttctttagatttacccacaagcgtaacaatttccttgctcattgtccttccattgcaggcacaccacccttattgtcctcatttgggggataattttccttcttctggaagtaatcctgaagtaatagggtgaaaagcctatagtttttgtttgtctgaaaatgtattttgtgcttgttcttgaaagatgatttcactaactacactattcaaagttgacaattattttcctgaaatactttaaagattttactcagctgtcagctgtcagtctaaacaccattcctgtgtaggtaatgtatcttcactctctggctctttaaagacctgctgctgatctttggtttgtgacagtttcacaatcatgtgtagaggtgccgctttcatttttatttagcttgattggaatttgtgtacttcctgagcctgagtattgtctttcattaattctagaagtgttgcagcttttaattcattgaatatttcctcgcccccttctctccttctaaaactccaaatgtgtgtgcccgcatgtgcgtgtgtgtggtgtgtgtgcatgtggtgtgtgtgtgcacctgtggtatatgtgtggtgtgtgcatgtgtttggtgtgtgtggtgtggtgtgtgtgtgcacacgtgtgtgtggtgtgcgcatgggcatatgtaatgtgtgtgtgcgtgtgtgtgcgtgtttgctcacaagttgtgcacgtctgtgtggtgtatgtgcgtgcatgtgtgtgtgagcatgcgcatgtgtggtatttggtgtgtgtgcatgtgtgcggtgtgtgcatgtgtgtatgtgtggtggtgtgtgtgtgcgtgtgtgtgtgggtgtgtgcctgtgtgtggtttgtgtgcatatggtgtagttgtgtgggagtgtgtgtggtgtgtgcatgtgtgtgtggtgtatgtgtgtgtgggcacatgtgtggtatgtgtgagtgcatatgtgtggtgtgtgtgaagtgtgtgtgtggtatgtgtaatgtgtgtgtggtgtttgtgcatgtgtgtgttagtggtgtgtgcaggtgcgtgtgtgtggtatttgtgaccacgtgtgtgtgttgtgttgtgtgtgtgtgctgtgtgtatgtggtgcgtggggtgtgtgtgtgttgtgtgtctatgtgtgaatgtgtgtggtgtgggtgtgcatgtgtgtggcgtgtgtttgtgatgtgtgcgtgtgtgtggtgtgtgcattatgtgtagtgtgtgtggtgtgtgtgtgcgagtgtgtgtggtgtggttgtgtaggggtgtgtgtggtgtgtggtgtgtgtgcgtgctgtgtggttgtgtgtggtgtgtgtggtgtgtgcgtgtgtgtggtgtgtgtgtggtgtggtgcctatgtgtggtgtgtgcatgtgcatgacgtgtgtgtggtgtgtgtgtgtggtgtgggggggtgtgagggtgtgtttgtgctgtgtatggtgtgtgtgtgtggtgtgtgtgtgtggtgtgtgtgtgtagtgtatgtgtgtctatcccatgccccatgtcttgcatcctcttttctaaattttctttcttttttactctatgctacaatttctatttaatgggaaaatttaattaattcagttattactgatatgatgtatggacatatctcttgatcttattttatatttcccaacttgccatccttgcttgttccttccccactccaccctttcctgttttgttttattaaaattgaccaacttttcttccatttctttcaccaatggtttggaaatcacatactctttttagttttctaataattatacataaaatttaaacatacctaataaacatgtttctatcactatgtagagttagcctgcatttatatcattcctccatccagacaaaaactttggctggacaaaaatggctttactttacttctacttctccctggtccccagccaaaaaacctgacgctttccccagagcaccttcgcagtgctcccagctgccctctcaagccacttcccaggtctggctgccattgtcagacgccactggaccggaaatctaccaaaacgtcaatgcctgcttgcacgtaagtccaggataaagttaattctagttaaactaatatgaaaagaaaaccacaaggggtgttcctgactatatccctcagttatagtttctgccttgaattctaacccatttgcctgctacctgccaggggctcctcctcagaatttctcttccaccaagggatttgtgttttcccaatttatcagacttttaaaggaatctatctgtctatctatcatctatctatctatctatctatctatctatctatctatctatctatctatcatctatctatctatcatctatacacttcctgtacccagtccgtcttgatggagtatgtatctttgcgagggcgaacagatttctcatatcctcatccagaattccccgagttcaggactatcacactgtcttggccatagtcaatctgtgttgattaatttactaaggagacaaaggttattctgagagggctcattattagggaaatgctcctgggcttcctttgatggcgatatgatcttaaggaatgcgtgagttcttctggttggcttgtcctgtggaagatttgacagattgcttagataggctggaaagcagcatcagttacagagccagggggcagtgttggccagctttacaatttctcaacattcagcccggtaagaaatttgactaatgctattagttcctcatcaatagatacacatcctcttgggtcctcgctggtgttttcagggctggggccatgtttcatctctctttgggacccacagaaactggtctctgggaaagccatgtccagccctagcgatcagcacctttgcagactaattcctcccctgcctgtggtctctgctcaaagctgtgactgcatcataaaccttcacacctgagtttgagctgagaggctgggaagcccaagaagttcctgaggcggtaggcagagatgcgatggcagttttagtgacctttgccttctcaggacagagcaaaggggccgacagctcagatctagccaaaggctgttccctggtttccctctcccccttgtagcctcttatcatggagggatcaagaaaccaggtgattgctgcaaaacaagcaaccgagcaatatctgcgtgatgactcaagcagtgcacctggctccaagaccactcaggggacagggtgggctaccagcaggcatcaggacccctggccctccatgtgtgtggggactggttcaggcttctgctggacgatgaaactacaggacaaagccatgagggcaggtggcccctggtctttcaggcacagtggaaaccctgctgctgccggtgcctctgcctgggtgtgggagtctgtttctctgagcacagtgttgaacttgggactatcccttttgtcctctggactataagcctcctcctctaaggtccacattctagttgtcactcaaattcaaactaaagcaaacgccgagttctagctgaggatccatttcctagcttcacctctcaatttttagttttatgcaagtcaaaatctaaaccttcccagccagagctggctgccattctcagaagctactggactggaaatctaccaaaatgtcaatgcctgcttgcacttaagtccaagataaagttaattctagttgaactaacatgaaaagaaaaccacaaagggtgttcctgtctatatccctcagacatgggcttgggtggctatgtctctgctccagccctaaagtagtgtgagaaacagcggttgtccctggcccagagtgacggctgatggggatggggcagttgtgagacaaagaagacattgaacggaaggaaggagggcaggagttctccagagccagagtccggtggtccttagggaaatctgtggagggccccacactggcagaggctgtgattttgggaaaggagtagaaactctggctattaagtctggcatgttcttaatgggactcatacacctcttggaattttagagctcaaggattcagaatttggatctcattggttcattttgcagatgagaaaactgaggcctagagatgtcaggggccttgccacatggcaggttggaggcagaacagagggcagaagccaggaggggttctaggcctctcccttggctccctgtctagtgctatctgtacactcaggagctccatgaaggaggaagccatttttgatccacacaggaggcaggacagtggccacagctcaaagttctcagagctttgcccttggagtgaccccaagatgtccctgtgatctcagagacttacagctctcaaatagcactaaaagtgacgcctggccttgagcgagagaaggcagtgcagctaccacagtaggggaaccccaggagaggcagcttgggaatggggaagggcattggcatgtgggggcaattgctgtgccccccttggccctgcaggcctggcagttagggactgttctcccaggtgtaatgattttcatggtgtcttccttgaacactgagggctgcaaggggtcttgtggggaagtctgttctatgggtggttgatggatgatgtccccagccgtgcatgctcatggatggctggggtgagtgattaagagttaccaggatttggtgctgctggaattgagttaccatgtcgctcatgctgaccaggagctgccccaccacagagcccaactgttctgcctcctgcaccgccctcagagcatcagagagcatagctgcctggccgggtatcccgcagccccaggaaggacgccaggcagttgctggattgcactcccacttcccagctcttcttgcgcttgtggccaccctctctcgtcctgtgcttcgctgtgtgttgttgggttgaccccgcagggtcaggggcgcactgcacttctgcagggctttgtgcacagtgccacagtgcatgaggctatggtgtgttgcagccatatgggatcctcaagccccctgctgaagcagatgtatgcgcagactccacatacctcatcctcacccggagttcatggggacatcgagaaataggagccagaagggaagggagccctgtcaccttgtgaagctgccaccatggcagccctagagatatagctgagaaagctcctcattttttcttactcaattttttttctcatctctttatctataggtaagcttgcttaaaagaactttgggtggcctggtaacttcaggacgcttcgccaattaccagaggaagtaaggcttgcccaaaaccgagcaaaccagaaccagtggcccctgtcacctttagatcattagcatatcattataatgctaaagtccccactcatagaagagaatcatagaagagaatcgttgccactttctgcacacgtgtcgtatgaagagcctgttcatgatctgcacctgcgtgtctgaagttcctccccacataagcttacatagctcctgccccacatctaaccctgttacattccccagctccccaccgctctggaagaagctgtctttagagcaagtgctctctccttctccatgcctggccgggaataaaacctgcttttccttttccccaatctggtgatctttctttgtagctgatgcagagtagagaaagaactcagtgaactggtgacgaagccaattccagactcccagcatctgggtcctgtacttgatctgagctctgccatgctcttctaaattctgtgttttggttttactgtgcatttcagctatttgaacagtgtctgtctctccccaatttgaactgtgacctgcttgcttgcagggaccaaaactggaccgtccttgtccaactgagagccctcagctcttggtggtgcacatgggagaagctcacaggtttcttctgagtgtcattggaaagaggtgtgtgtgtgtggggtcacagagacaaatgaagagaacaggaagagggagagatggaggagagaagaggaagggagggttttaccagctctttggagaccactgagtgcacagggagtggttggggatccgttatcagccaggactgtttcttgagcatctgagcactgcgactctggagtaatgggcatggcaggagctatgaaggcaaatggcgaaggccgtgttggtgggctctgtccctaaagctgttaaattaagatgctctggacgctatggctctgctacctactagctggtggcctcgggtgagcttctgtcctcctgcttattttcacacatgtacagcaagggcaagagcattcactgctgcaggttgtagggtcagtagtcacagctgtgttggcatttctggcctaaacattagtaccgagacagaagcgaatcccggattcccaagaaccctgccctctaagcacttcgtgtgtctgcagcccctgcctgacagcatccagcgttccaagtgagctctcctgaagttgaggccagcggcttcttagggagaagatgtgaccagcactgcccagatagcctgctgccctgtccaaacctctgagggtccttcgggatgcagggccaagagtgggtgctccttgtgcttgttcaatcttgtgcttgttctgcaagagttgatgactggctgccaggagggaggcagtggggacgaccttggcctgggctgtgacactcagaaggaaggtctcaaggccacctctaggtaactcgggcagcaagaagtgcagttctgcaccacctggttggttctgacatgtttggttctgaaatgatcacttcttcttatccaaccagaaggaacgaggtagcatttattttaaaacagagttagttctacctacttttctcattgcaactgtagaagaccttagaaacgaaggtagtaggaagaaggagccattgccgtgcactctccatggggtggctgttggtgccaggcccagtcacaagcagcatagctggtctcttctctcacagggctccctcctggtaggaggactaggaagataaacacagagctaataagtaacagccatggagaaaagtcaagtcaggggttgagactagggaatgagggcggaggtataactttatgtaggtgacagggaagaaagggctcttggatgaagggatgtttgaagacacctgaaggaggtgagggggagtctctgtggacaactgggtggagcattccaggcagaagggacatcgtgtggcagtcctgaggtgggagcctgctgggtgatgggaaggacaggaggaggctgatgtgctggagccccaatgagtgagagcagaggaagagggtacactggatcagggagggcaacgcttctctaacgtgaatgtgcatgcagctcccctggggcttaagatgcagattctgaggcagcaggtctgagatggagcctggcattctgcatttctacaaagtatccaagtgatgctgctggcccatggaccacacgttaagtagtgaggctatggcctgtgggccagggaatgatgtggtctttgttttgaggagactggggagcctttggattgttccaagctccagagcaagttcctctgactcttgttttaaaggaattgcactggctgctggttaggctgtcaggggcaagggtgaaagcaatttgaagcctactgaataatcctaaaagagatgggtatggttaggatggtagcaggaggggatggtgatgggggaagaggttagtgctgcaggtgttctgaaggtgagtcacaggatttgctgacaggctgcatgtggagtgtgagggggaggaatctaggatgacaagggtatgagcccaaacaacaggaaaatgccatttccattcactgacatggaagatccgtgttgtggggaagaatcccaggacttggtatgtttcagatgtgaatgagacatttgaatacaggactgagatgtggaggaaaggtccaggcgggaggtgtcaatatgaaagtgagaggctagagagctggctgctgtttcctagggggcaggggagaaagggggatttgagggctgagctcctgggcacttcaacacttggaaggcagagagaagaaaggcacccagtacagggcactgagaggcaatagtcagtgagtgaaagaaccatgcatttttcagcctcagttgttgtatcagttaccactgctgagttacaaaccatcccaaaatttagtggcttaaatttattccttctacaattctgtaagtggactgggaggttcctttgcatcccaggtgttatctggggtgactcatgaggctgccttggctgggacaggagcctccacattggcgtcattcttgtctgggagttggtcctggctgtggatgggacagcttcatcctcgccctgggtcccttcctctggaaggccagccccgcttcctcacagctcgcagctgggttccatgggaggataagctggggctacggggtctctcaggacctccacatggaactgtcacagcatccctcccaccaggctgtactggccaaagcaatccagccagccagggtcctcctctggacagagcagcacaccatcatgtgcaggcggtgcaggcgtgggaaggaagagttggtggccgtctttgggaccccctgccacagttaggagctttctcagtttacaattttactactcactgacctctgcctctcagtgccctgtactgggtgtctttaatattctattcaaatgaacttaggccaacgagctccccactgggggcactgggtgttagtcttgctcttcccttagccagctgcatgctctttagtaagtccttttatttatttgggctcagtttcctcattttttccacctggagtttgacagttggtgggaatggacagcactagataagtttcaaattaagtagactagtcgggtgccgtggcacacgcttgtagttccagatactcaggaggccgagtcaggaggatcgcttgagctcaggagttccaggctgtagtgagctgtgatgggaaccattgcactccagcctgggctacaggccctatctctaaaaaagtatcataaataaataaaggagaaaatgcaggtcaagcgctagcactgtgcagggcatgtgttatgctagtagatgtcactgattctccagctctaggtacactcctgtcttctctggcagacagcagcattccccagcaggggctggtggctagcccacgcagaggctcctccaatggcaggctcctcccctctgcaagccctacagctcaagggaaagaaactttcccatcacagagaactcaataaaccagttttccaaaatctctcttccctgtgtttacccgtttgttatgaatttacttcttgggtgtcagaatatttaagaactcggtggagaccagttttatacgtttccttctgtccttcctggctccacagctgcaaaaacatcatccccactactgagcttactatggggccacgcaagggtagacgcttgacagacattgtccaatgtattccttactgcagctgcccacccccgccgtccccgccccccagggagacattacttccgtcttccccaaaaggaaaacgaggcaccgagaagttaaggaacttgctcaaggtcacagagtttgaactcaggctacagatgctgcagcaactggagaaagtcctcatcgccccatatcacccaccaccgacccccagcaggacgtgacccccgccaggacggaggccggcagctggggggctggagcatgggacccagaacacggactcaggcttgcgcagcctcctggcttctaggcgggagcctagaaaggcgccagcccctttcgcgtgctgctgagactccaggggtggggttcactctcaggggcgcacaaaggcatgaaaaccttggcttcagcctctgagatgcggaactgaccgacctattgtcttgggacccaccagtgcgcttgggtgcaccagcccccttaacgttggtgccggctccctcccggctcctccccatcccagagggtcccctcgccccaggccctgagcctgcgtcctggggtcctgggccgcacgtgcctctggcagctcgaagaagctgtcggggcttgcaggagagcgtgcaaactgaaaccaaaacaggccgactcgaggaacatccgggtgggaccgcagactcaccggagcgcagcgcctgggccagggcctgggaccctgctccgccccgcgctcccctgcaccccttccccacgctgctcccctcttcctaagcggccccccctctcccgggcagcagaagaaggggtgggacccgggcgggctccgggagggggccctggaggaatggatggtggcggaagggcggagcaggggcggggcccgcggagactccacggggcgccccgggcgtgaggcacccactctgggagcacagagagctcaggtagcctgcctagatggcggcgcgcaccctgggccgcggcgtcgggaggctgctgggcagcctgcgagggctctcggggcagcccgcgcggccgccgtgcggggtgagcgcgccgcgcagggcggcctcgggaccctcgggcagcgctcccgcagttgcagcagcagcagcacagccaggctcgtatcccgcgctgagtgcacaggcagcccgggagccggccgccttctgggggcctctggcgcgggacactctcgtgtgggacaccccctaccacaccgtctgggactgcgacttcagcactggcaagatcggctggttcctgggaggccagttaaatgtctctggtgagtgggcttcgggagacccaggacgcccccaactcttgggtcccgaggggactcggagcctctcgccagcggcagccgtccccgggcagcgcggatcgcagccctgcaggggcccctcctccggtattccgtccgccccgcccgctctaagcagtggctccacgtcaccccgtccctcatcccatcgggccccagatccacgtgcccagctcgggccggcgcccgcggggacccggcggccgcttgggacgccccgctgctggccttgctcggcgcggctcctcgctcggcggactccagagttgcgttaccgggtgcatagcgccgctgagcaagagccggcggggagccgcgggctacacccgagcgccccggagtcgggactttcccgttcccataccggggtggagggaaaaacaaagcggtggcggttgtcactgcgggctgcggtgcccggggatcagcctggggacaagccctgcccacgtaaacaaacagagctgtggcgggcgacctggggaggaggaaactcggcgtggcagctggaaccagttatttcttcgctgcgggcctggggcctggggcctgtggacgggaaggaagtaacggcggcctccccgttctcgttctcggcctcagagaactgcaccccagcgacctggggcctgctttggacccgcggggtctgacgtcggccccaaacagttgactggtggtcagttgtttggaacttgctgagcagaggccctgctgctctgctaagatttggggctgggggtcgtacacagcaccctcgcccccacctaaggcgctgactgggcaccgagggggaggccctgaactgcaggcagggctggccacgcagggtgggtgccaagtgcgaggtgggctccggatgcagggtgggcctgggtgtggggcctgcggggaggggctggcagacacggtgttgatcagagggatgcagaccagaagggtggtcataaccagcttgctggatttgggagtgtttaagaaaggacctgcgggtctttatggcagggtcaccagggccccattttctccaactcctccctcagttgtccttgttgttctgcccccccagccctcagtctcctcattgtgaggatgggggcagtcatgctcagaggttaggctgagtgctgcaaggtgtgcagcagacccagcgcttactggtgacccataagcagtagcgattttagataacttcagaaatagtcatacaattatagatagtgtcttgcagttatttttcaaagaaattggaaggaactttggacctcccccactccccgaaattgtatattactttgctggtttaattaaaatgagtcacttactagataagtgttttctttaacattgagtcagcagcaagtgcccttgaactagtgggaaaaaaaccaaaccctttggtttgcagagttggggcaatgtgcccttgaaggagactagagcagcttgcccaaggacagaggtggaaagtgacctgctctggacttgtgaggccaaggtcatggggaacattcacagttggcctgtgcacacttgcagccccactcagataagacagtggggcggacctcctggggccaacagcaaggaccttctgaacctcgctcggtcaggatcagggtgtggtcagcaagcattcttctgtctccttttccttcacttatttcttctgataatatggcctttatggctacgttagccagaaattgagcttcagaaaactaacttgaaaaacagcttttcagcagctttctcccctgggatgtgcgtgccctcctgttcatgggtcagcaatatctctttcctttgccggtgtctgcaaaccatagagaagacagtatgaaaaagggccaggccaggccatgactcttctgggagcatctagaaagtcgtgggatggatgagaacactttggtctgatctgtcagctgtgtgtgataaagtcagatggcttgttccaaaggaatatcactcttgaagaaagcttcacctcaccccctcaagaataccagtggttctcaacgcatggtcttcagacctgcagcatcagcattacctgagaacttttgagaaatacaaattctggagcccatcctggacatctggaatcagaaaccctgggatgggacctgacacctgtgtttataacgagcccttcagatgctccagaggacactcgggcttgagaaccactggcctgtacgcctcaaaccagggcagatgaaggcacttctaaaacagaattgggattagtgtcctggccttggccctattaaacaaacagcaagcaaatgatgggctgtggatggcgcaacacagtttcgtggctccaggtgtctttagaatcatgactcgggttgatttcttgctttccctgtactgtactttgcatgtttcctcatctgtaaaacaagggccgtatgtaactgaattctgtcctagttactattgatgtacatcaaaccacccctaagtttagtgacacaagataacaacaattttatattcctcgcagagtctgtgagtcaggactttggacagggcccgatggggatgactcatgtcaaagggcaaaattaggacaaatttagtttaaagaccttacttcactttattcgtgattatagaattgggaaacaccccattccataaaatagaaggaatgtttgatgagctgaacagaggaggatggttttatagacagaaggggctgaaggatgcagacatggagaacaaaaagtggactggttatttcaaagctacttttgttgtaaaggtgaaagtggaaggagctcccttatcatgccagcttgtttggagatttagctatctttcactctccttgtttcttagaaggtcggataaacaacttagtttccatttggtgacaccgcactttagcaagagtgactccatttttgtgtgatctattgggcctcatgcagctcagtccagaccagtggcctcctatacattttatttaacacttgctcctgctcctcagtgtctgaggttggagtcatctgcctgtttctcactcccaagtctggagcctggtttgggacaacttgcaggctggcttcagccagaactgtggcccaaagcacctcctggggcttgtcacagcatggtggctgggcccaggcaatttcctgcaaccagaggtccaagagaccagcacagatgttatcaggcatcttccgacctggggaaggggacctgagtgtttgcacctgttttgttatccatgggagtatctatcagcacacccatcccagggctgttagaatgaaatgaggaaatgcttgtaaggcactcagcactttcttaacacattatacatccccagtcactgactatttgttatttattaatgaagcatgtggggaggctgtgaccttgtgcttggccttcggcagtgctgctgagagagctgagcttcatctgaactggaccacatgggcttgcatctgatcagcctgggataggtggggaataggcttcggagagcatgcaggtggctgaggttgctttcaaagctccacagtatcctgcccatcccacaactccaatagccagttgaggttatggtgtctgagactcactgggcagggtagacagagtgtctgtgcccttctgtgacttgcttctattgtgtaaaactgccttgcagaaggttctttggagagccaggttctaaaagggattctttcccacctgtgaaatttggctctgtcctttgtagggctctgcagctctttttgccctgtggcatatcaactcaagatgtcaggaagttgtaaatgcagaaccagagggtaatgacatgtgttgctttcaaaacacacagctaagctctatttttaaaacccccaattttaagtgatgtttttcagtgtgtgtactcttaagcaagagtgtaaaaatcctctttgtaaccaagcattgagcactgggaaatttcttggatgctttttggagattaattgcaggaacagaggcccttttgctgtagttcctctgtgtttgctgtagtttcctctctgtggcatgcctctaatcgttcagaaggcaggacactgacagcggcaagacgctgtgcgcctgtgcttcattttcctcctagtgattccagtgattaaagtaacttttctaaggtttttcagggaactctacatgaaaaaggaacccctaatcttaggaggaggatcctcccgaggaatccaagtcctccccagctgtcaggggcacgacttactttaaataacagatgctttgggaaaattgtccaaaacaatttttgtgactgacgtaatatctcaaagcctgccagggaagattgctattaaaagaaagtccattgtgggccaggcgccgtggctcatgcctggaatcccagtactttgggaggctgaggtgggcagatcgcttgagcccaggagtttgagaccagcctggcaacgtagtgagaaccccatctcaaaaaaaaaaaaaaaaaattagccgagcgtggtggtgcatacctgtagtcccagttacttggaaggctgaggtgggaggatcccttgagcccaggaggtggaggttgcagtgagctgagatcacgccagcgcactctagcctgggcaatggagtgagaccctgtctcaaaaaaaaaaaaaaaaaaaaagctcattgtgaatagtaactccgtattcaaattgaatttctgtatgctgggttccactttcagttagggtgtgtgagtgtgagggatgtatttaaataagcaacaagagtacttgaaaattcgtacgtgtgtgtcaggattgtaatggaaatcccaatactcttataatgcctttttaaaacaaaataccaaacccctgccccagccacgggcattggccgactgcgtccagctgtgttaggccctgggtggggccctgggcatctgtgagcgagatggagcgccctggctggccggccctcagctccgcatggcttgtcgcatcctcatggcaccaacatgaagtggttggtggtcccattgcacagatttggaaataaaggctccaattcatgtacagcaatgaataatccagaaaatgctcaataccacagagcccacattctaatgaggagatgaaccataagtcagtaaatgagtaagtccacactgaggtgggaggggaattgtgatgtaattcccaacgccagtctacatgataaaggaatcttagggacacagtccctgcccttggggaatggcattgtgccctgtaatggggaccaccagggagcatggggcagtgtgaaatggtgtgggcctctgagaggcgaaggacaggtcatccatcatgtgctgggaaacttgggaaaggccggaaataggaggtggagtttcagctacactttaaattgccatgggtccttgcccaactcttcttggaaatgctgagaaatggaattttcttgtctcactgcccatttctttgggcagatttttttttaaactttcttttcctcctccctctcttccccacttccttcctcctttccatccttcctcaccttcttacctccttcctccccctcctttctaccttttcatcctgaaattgaagcactagcaggaaccataactatgtgcgaagagccatgtgcacatgggtgttagggccactgtcccccaaaccccacatggagctttcttcaggtgcctgtgtggtctgagcaccagccatggtggccagaacaaagatgggggagggttgttctgtttgccttcttgggggacaccttgactccatctgacccacagccagaaacaacccaatggcacctagtccttccagtcccacccagaccaaggatcattatacccactccaaggattaggaaatgggcttggattaaatgatatgtgcattgtctgtggttagtgagtggctggacaggggctggactttagaccctgagtttttagtggtgactccaggctgccaaccagtggctcatgaggctggcaagtatgtgtaatcacccctgtcccaaaggaaaaagaaaaccattggaaatcttgcatctgcatagaaaggggatgtgcatgtaggtccatgtgcacacatcgtcagagtcgggtcccaggaccagcagcggctgcatcactaggatcttgttagaaatgcagatgcccagaacggggacggggcacactggctgcagctaacacgtcctctggggacttctgatgccactcaaggttgagaagcactgatttgggccaaaaaagagaatgtcttctacttaagggatgaagccacaaagacaagaagaggtctgctccctcccttgggcatgaggggaccacctggtgccagttacacctcaatatgaccctttggctcgaggacgcaagtggtctgttcctcagctctgtgctctggaccaggctacctgaacccagacctgagcaggacactcagccctcgccctagggagcgcagcaggcagtgagcatctggaagagttgggggatgcgcagggtctgggacagtgaggtgctcgggagagtgagcgccttgggctgagagctgcagtgtgggtgtgaggagggcacagtgccccaggcagggagaagccacagcaaaggcctgagggcaggggagctcaccagatgtggcccggtcagcagggagaggcaggtcattggggccttggtggccactttttgagcacctctgcatgtggcgaggcacctgggggacactgtgtttggggctctgttctgatctgctggacccaggccacctgtcagccctggaaagacagggacacagggcttatctcacgggccacccagccgcacctgggtgctgtccatcctggggctggcctgcccctctccaccttcctcacctctgccttcctgcttggtataaaatggtgcaggatgtcctgctgggctgggaggctgtgagggcctgtttgaagttgggcagtcactgtttctgagaagagtgtcctggtgccctggctgctgtgggagcaggtgaggcgatgagatgaatgccaaggcgaagtgtccagcgtggttcgagcccttcctgcttcatcttggctggggccttgggcaggtcaccaggccatgcagagggcgtttgctcatctacacctgggcaggccactcttccggggggctccagggtcaaatttggagtggagcaagtatgtcaggcagagcttttcagatatgagagtgggttcacatctcctggggcttcttatgaggctggttgggactcagcaggtctgggtggggctgaagatttgcatttgtgaccagctcccgggggggatggtgggtacagacagtgtcgatcctcagctagacattcccaggcttgtcatagcatcatagagtcactggaggtgacaggcaggcagcggggtgtaggactctctgtgtagggatggtctcctgctgattgttcagaagccagaagtccatggctttcatgtgaaagctctcgatttttaaatattggactggactcacacacgcatgcctgcacaccctggtcagggtggttagcacaactgtatgctggactcagcctagggaccacgttggctaatatctgctgtacccgtgtattaattttctccctggcagttgtgttgtttttccatctccttcagggtttacatgttcctgtcgcctgcctgaattggcctcactattcttctcaactgttctgtcttccgtctgtaagaccaagcctgattcatccctcctccccaattcccccactaccggcaaagctcgcttccctcccacttgttgcatagagcagttcttcaccgcctggtgaagaactggactgttaccgggggactttggagggtggggcggtgggacagactgtggagccaatctgcctgcgttgaatccagctctgcctctgtgtgaccttggccaggcagcttaacttctcggggcctctgttctcccatccataatgggagatgctggtggtgcgggcgctgtctccgtggaggctcttgcagtaattattgtttcagccccaggctgctcttgacttcccagggtttgccttcccagggtaaattcagctccagtgccctgtttggacaagtgtcatgagcctgccgccaccggccttgtgtgtttggtcacttttgcatgtttcttacgtttgcatctgtctcctgcacccatggcaggggcttcgaatctgccctggcatttccctcagtgttcagtgtggggccttgatcaggattggcacccaggactggttgggttaaaccatctcagggttgtatgctccttctttttgctcctaagagactccccaacacccagcaaaacattgtggggttaatgctacacttggcatgaccacagtgaacagaggttagcacccccagctccccaacacacacagagatgttgtgtaaattcaggtctgccactgatccccttcttagtttgtcttcttgtttttattttcttctattttttgggcatgtcttctcttttatttttctgttaatagtagttcaaagaactttcctgtgtctcttactagtattagtaattttttcctggaatctgtctacatttgttacattttttgaggtgtaatttacaaacaggctacaggggtgaccctgagagaccaggtgggtgggtgctgctgcccccaaaaccattcatggggctcatgtccctgcatacctggggaccctccgataagccagtgagtgaggagagctggcttgagggttgccagaaggggctcagctttggaatctaatgagtagtgaccagcctgccagcggaggggccccgtgctgctaatcctcagtctcacggtgtgccacagagctgtttctgccggagggtcatgtgtgggagcttgggtaatggagagggagggagcagagccttctgcaaaaccaggacatttccccatcacgagccacttcttggaacaaggctggtttactgggtgctcgtggaacacgtgggggagttgggtcctcgtcccttcttgcacctttaaccttgggggcaggtcagcactgggcacatgggaactgcaggagccaagccctgaaacaggaacaacctgtttgcactgagtgttctttccaacagcttaggctgcagtgcccagccctggctgcacatcagaaccaaccatgggggctttgaggctttgaaggcccaggacccattggatggggtctctaggggtggcccaggagatgccaatatgcagccagggttgggtccactggtgtgaagcaaccacttcaaaatatttgcaggacatcaccttgtacctctgagatcatgtttgttcacccttctccttgcaagggggtagaaacatcatcactgatgaggacagggtctctgtcagtggaagaagagagagccacagcaaactagacccgctccaacccctcaacctggccgaattctcactcaaaaagcaccaagtgtaacatccgcaaaccctctttttgtacagtcaactgcttggaccagcatgttcggaagtcccccgagagcgttgctttgatctgggagcgcgatgagcctggaacggaagtgaggatcacctacaggtactgtgccctcgaatgttcaaggtgcgagggaggcgcccagcccagtcctgtgtgctgagtctggctgtcagggaggggccgtctgagtctcagggagtgcattttggctttgcaagtgctctcttatccaggaaaagtaaatgtgaacgcaagcagaatgaaacacagtaaaagccggtctagcctgcctggccacactctcagcgccttgtgaggatgggacaataaataaaatcatctttagtagagttgttttgtttttaagctgatctttttagtctctgattccttaagcagattctatgtgccaagcatgcttcagatgctgtgtgctttgggcggtctgcactggccttccccaagctgcttcctgtaggggctgctgtgttggtgcagcaccttggttctccatgcaaaccccgtttgcctgaagctcaccttacccttacagagatgcctcaggcccactgtgcccctaaactgtgagttcctaagtccccatcacacacaatcatcgagcgtgattactctcctgggggcagctccagggtcttcttgtccaattacttagcaagtcttcactgggtgccttcgtgtcagtatgggctgcagtatgttgcagtaacagacaatccccaagcacatggcagagtgtggctgggtggccactgtgagctgaatagtcaggaaggcctcttggaggaggcaacattccagctgaggtcctgtgggccaagaggagcagccctgagaagacaggggcagacctggtgcagggatcccagaggtagagggaaggtgcatgtggctgggacacaggagcgaggggacgtggaggaggagcattccgacaggcaggtccacactgggcagcctgagagcagcggtcactgccctgccactcgggtgacctgggggcgaaggggcacttgtagtttcctgtttgtttcttgaactccaattttatcacagaccaaattcaccaaacctgctaaaaccgtgctcatgctgacttttggaggcagatgagtgatgctagtggatctgctgcggctcccagtgggccctgtcctgctcgttcctccccttggcccccaggagccctcaggcccatcacagctccaccagcctcggccagggctcctttgctgacccgtctcccccaccagccagactcacagcctatacagcatgcatttcttatctctagtccctggttgcagatgccgtgtggcccataggccagcagcattcttctgccctggatcctcgggccccactggacaactgagcggccccccaggtggcccctgcacactggagtgtgcttggctctgaagacccaagctgctgcagctgcccctcgccacggtgggcccagctccatctgcctgcgaacaaagccccttctgagaaggaacttgaggctgctgcccctggagtagttcttcagtaaaagatgaaaaccctctgttgggggtcgggggctaaggagctaactggacacctggaggtccggcagggagggcccagccatggcactccccgaagggccagtttctctccatcagtctctcaggtgtgcctggaccctggggcaggcaggttgtgtgccacgccccctcggctggacgctgcccatgggagcactgagtgtgtgctaagtagcggttcggtctgtgagcggggctggagccctgtggagacgtgtggttaaacataaaccatgtgagaattctcaggaccacagccagcctgtggaagctaaggacagcttcaggtccatgacactgaaatggccctggcaaagtacttattactctgtctctaaaaataaacaggggccggtcgcagtggctcatgccggtaatcccagcactttgggatggtgaggatcacttgaggacggtgggtggatcgcttgaggtcaggagtttgagaccaacctggccaacatggtgaaaccccgtctctactaaaaatacaaaaattagttgggtgtggtgatgtgcgcctgtagtcccagctacttgggaggctgaagcaggagaactgcttgaaactgggaggtggatgttgcagtgagccaagattgtgccactgcactccatcctgggtgacagagtcagactccatctcaaaaataaaaataaaaataaaaataaattgacttcttctaaaatggtttgcagactttagccaggcttagtaccaggtgaccatttctatttactgtttgagtgaaaagtgttacctgtaattgcagctagtatttgagggatgtgagttcctcattgtcctggtcaggctaggtttctgatgtgaggttttcttcttcctttctctgaggaaagcccctagacattggcactggttgtcctcctgacagacacatcactgccactgaacacagtgcttttctgcccatgggcctcgtgccacagcactcgaggtgcctaggatggttgcaggcctcctcagctggaagatcaatgtccagactagcagcctgggccctttaaagaaaccccgtggggctggtagaggttgggacgctggtgccgatgcaggaagcttgcagggtgtgaggaagtctgtgtgttacaatcccaggtgacctggcaagggaaacctcccgactctggtccccaccgtgaccttaggcacaggtgacgctgggtcagcacaggcagatgcagccctgggacgggtgcccatggcctttaccctgcaagtggaggatttgcaatccctgcttccccaggtcctctggggtgcagggtcagcagaaagaggcccgttctagttctagttcagtaccatcctgctgctggcctgtgaccttgtgcagctccctaatctccccgggtgtgactttcccatctgtacacccagggtaattatcacaatggagatgactgtaaagtaggcacagggagatgacagcccgaacgcactagcaagtaagaatagccgtgataatgatgtagctgctatttattgagtactcactggattctagagctgttttcagcattgtaactgggcagcgaggttggacctcgtgctggctggctgcagggcttggagaggaggaccccctcccctgccgcggttttgccccgcttcctccttcacaaatgcagtcctcaattcccactgggaggtgaagggctcagcctgggacgtgtgcacccatctcccagggcagtctgccacccgactccagggtcccagctccatttccagccttcctctgcccggagccagctgaggcagcccttctcccctggtgagccagcaggctgaaagcccagagcaggacagtgcctgccagaggctgtaggcctagtggccccaaggctgtggggccaggcagcactctgggacggcagtggctctttctggctgtttacctgcacttctccagcaggtgcccattttattttatttttaattattgatttttgaggcaggggctcaaaaatgtcacccaggctggagtgtagtggtactgtcacaactcactgtagccttgacctcccgggctcaagtgattctcctgcctcagcctcccaatagcttggtgtgtgccaccaagcctaagctttttattttttgtagagatggagtctcgctatgctgcccaggttggtctggaactcctgggttggagtgactgcccaccttggcctcccaagtactgggattgcaggtgtgagccaccgcgcctggccggtgcctgttttagaagactgtccttcacactgtagttcacatgggcaggttctagagaccctggggggtggccatgtggagaaatgcaagttcctctctttcggaaaagcggtggcccaggtagatgaatgaggctttgagatggctgctgcctagctggtgtgtttctccctgcctggagcctggagcctggggtctgggccaggaattcccaggctagggttggactccaggtgcaggaagcagcctgaggccctgtgcaggtccagatcttctcagccagcagggtatgcccccacacagaggagagagtggactgtgggtgccaggctgggggtgcctgcagagcctccaaatcagtgaacctcttctctgagggtctctgtaggggggtgtgaacttaaacttgaacttaaatgagagcatcttaagccagaggaccaagttttagctccggcttgtcctatggccttggacccatccctctgggctttggtgtcctcatctgtaaaaggagggattcaatggccccagtattccagccctggcaggcgtgcatgaagcacggaggagcagagctgggccccgagtctgtgaggaagcacaggcatcgtgtgccactctgggagctgttcccccgtggaaactcctgctggtgggggtgatttctgtggctgttccttcctggcctttttattgggtggggtcgtgcacagtgagaaacccctgaccagagaagcagaggggatgtcaggcctcccccaaccccacctacctcagagtcccaggaagctgagggaggttttctccctgggtgtgctgtgctgggctgggcatggggctttactgcgaatctgtgaggcctggcacctgatgcggaggcctgcagggctgtgcatgacagggcctggccgttcaccctaggcagagggagctgccacacactccagctgtggtggggtggggactgagcctggggccacctctctgagaggcttgtttctgttgtcagccctggatgtcttcgaacacagccatttagggaggtcacagaagtggctggtcccttggggggagcaggaagcaggaagtcctgtcacagacacttaggtggagaaggctttgtggagggttgagttttgagaggcagaggaaggggaagtgtggcgaaggcaggagtgggggactggtgaggacatggcacggggaggagccagggtctgggaagtggtggaggcgggaggctgtgccctgcctgccctgtccctggcagggggaggggccagggcccaggacctggtggaggcaggaggctgtgctctgcccagcctgaccctggctgtggacctagagcctgtcactccacctctcccacccttggttttctcatttgcaaaatgcagtcacacttctcctccactgggctgctgggcgtggagaggggcatgtgggatgaaaaccagaggggtgtctggaggatgagggtccgtttcagctgcaggtcagggccaggtgaaggaaggccagcaaagggtttcagatttgaagaagggcaggacatgggtggccccatggctgctggggccgagagtgggtgggtggtgatttcaggggtgacggtactcagcgggactttgcctgggaggacacgtacatcagctaaagtgtgccccctccccatgtccctagtgggtgacccttgccccttgctcttctgctcacctcccaagttaattaccctagtgagcacactcccttattaaaacatcagggcagctgggggaggatcctaactcacgggaggctgtgggggaacagcctcgttgacccgtgtgtgacacagcggctgtcgtggaaggcaaactcggtgtggtctgtggggctcccatggtggggtgaggcgtggagtcccggcctagctgccccacctgagaggagggtgcccgggcagcctctgagacttgggctgggacccttggtctggaatctgcacgctacagccagaatctgataggatcccatgttactcggggtgggctgtttttgaagcagcatccacctttcctccagccccaggctgcggctgctgccactggaatatttggggtcttcctacgcacgctgcctgtgctcccttgcgttctcctgggtgccgaggtcctggcacgtcgtagtttagagaggccccatcttcagactgcagcacagtgacccacactgagggagtttatgtccacagagacctctttgttggggacaggacctttctgagaattctctggggcgaccacaggcaattctaggccagcgggtgggttgtggaacctgactgggctgacacctgggctccacaacccactgttagggcaggaggatcccacctgtaccttcttggatcccaggccactcgaatggagtctggcgtccttcctcctcatgcaggtgaccaaaccctcaaagtcactccagtgtgcaaaggcctttggccaccacagctgttcaaaatctgctgtaactaacaggctctggtcttcaccctgatgtatttattccacccacggtggcccatctcatgtggattcccagtaggccagcccgttttcaacaagaacagtcttctatcttcacattagaaacccattagttttttggacttcacaactaaattgtgggacagttttccaggctaacattttgtatggtttctggcatgttttcccagtgtgaatggggccacttttgtggaagggctcccctcccaaaggggtattctgcctggtgcagattccagcatccctggggtagtgcctttgaacagggatgagctgcaaggccacgtgcggtggcctggggacaagggctgccatggagagtctgtgggcgtgctctcagcccgtggccttatgcccgggagtacggtgccatctgtggaagcccagccgtgagcttatgcagaccctccatgccatcttaaacccagggtcagagggagtgtggcctggaggtcacacggggtggactgaaaaagctgcatgcttttgcttctcaccttccttccaaattaacaggttttttttttttttttttgagacggagtctcgctctgtcacccaggctggagtacagtggcgcaatctcggctcactgaaagctccgcctcctgggttcacgccattctcctgcctcagcctcctgagtagctgggactacaggcacctgccaccacgcccggctaattttttgtatttttaatagagacggggtttcaccgtgttagccaggatggtctcaatctcctgacttcgtgatccacccgccttggcctcccaaagtgctgggattacaggcatgagccactgcgcccggacaaattaacaggtttttattagcaattacttatccttaaatgaataattattcaataaaaggaatgaaatcataaattattaacaattattgttttataaaggggaaaattagttcaagtgaactttaagggtggcctggggtggggcatctgggcagcttctggggtgtggctgcaaagatagaggaggaggctgcccctggggctgggtggtttgggtattggggctgcaggctcccaggctggggctagtgtcaaacgggctccgtggagcagttgtgtgtgcatatcttccttgtgcagtcagtcctatcaggagccgagaatcagcggtggaaatatttgcaccatgatcactggcaaatgttataagtcaaggcttcttttgcagagaaactggctgttatccagcacagcactggggagcaggagcctcctgttctttggaggagtttgatgcttctctaggctgctgccaagaggcaaggaaagtcgctgggcccgaggcaggtatgccaagtggctgtgctctctggatttccacctgtgtggctgtgtctgtgaacttcccctccagggcttactctcctccaggtgttaatctggaatgttgtgtggactcccaggaaagcctgataaatagaaggacccccaacctgcgtccaggctctggagcgttctgtgtgaagttggctgccctgtgttgtgctgtgtctgtggcagccgaatgggctctggtagagccattcagagagacggaacagagggcatgtggggtgtgcaaacttggagtgggacctgaaaaatctcctgtggttttttttttaaccacaggggaaagtgaatgtttacagaatgttaaaacctacacccctttccaaattccacaagggaaaggactcacttctgtggctttctcccaggaggtaaacaagtctgtccagccaggggcgaatgttctgccagggcaccagctgttctcggggctggcttccaggactccagtcccccagtgtgctcttgtcctgggctgccagcctgcaggagcttccagagttcttcaggcattgacacctggttcccgcagtcatgtgagctgggctttgtgtctggaagggaaagaacttcctttccagagacaagacttgggccaaaggccaagtgctgaggtcgaagggaaaaccaggcgttaacaggaatgaggacagagcttctctggagtctggcctggtactttagtcctacaaggctttcttagaagctgactgcatcctgggctctggttagaggagaaaagaaaaactaaggatgtgggatttgacctgcctgtgcctggggaggcatgccctgggcaggtggccctgaatgaggagccaaacactgaatgatgaaggaaaacgccattccacacccaccctcggccctgtcctccattctggggacaagaagaaaggctcaattgaacccccatgcgtgtggggactttgggcacttctcttgctaactttcccttttgaatgagaatcagcctcaggttcattcttagaataaatttatattaaaaaaatgaactaactcaagaaaaatgttacatgaataattatagcattggcagatggcaaatcttttgaagtttgggagcctttgcaataggagtggttctgatactgaggagctggctgacagcaaggcccctggagctgggcctgggtttgaatcctgccctgactccttcagctgaatagccttgagaaagtggcccaacttctctatgcctcaatttcctcatcaggaaagtgaagaagggaaggggagctcagaacctatgggctgttgtgagggttaagtgggttctccatgggaacctgctctgtgggagcagccctgggtacaggatacttgcttgatagctgttctgtccttgttccatgggatggggctgtgaactgagggtggggtgaggacaagtgggaggaggggcaggggagggaataccccctggatgcagaggaggtaggaggccatgggcctggagaggaggtttcctgtgctggcagtggcaggcaatcatggctggagaagcttgggtagccagcaggggggcagtgacaggacgacatggcagatggtggtaggctgtgcagagcatgtggggtggaactgccttccctctggccttttggaagcacaggcctcgggctgagtgcctggaacccccagactggcagcaaccccaactgtaggaggctctgcatccttctcagatctactcccgccctcagcacctgccttgggggcatggagcaggcaggctgtgcaggtgagggcttcctgcaaggcattcacacagctgaggtgcatgtgccctgagccggcgacacggagactgcagcttccataaggcaaaccagcattttgcacctgccctcctgagaaggaggtgcctgaggtgcccacctttcttaaaggtccatcagtgttcaataattctctttttcccatgtcttgtattttctgcagtcattatggccactgtttacaggtcaccttcaaaggtgcctgcaacttcatatttggtctccacgaccaccttggtagtgggtcctattattaggccatttcacagatgagacagttcaggccccagtggtgtggggggctgtgttgggaaccctgctctctgatcagtcattgtttggcctcccgtgagactcctgagtgataaacttgcaggttcagcgctttccacagagtctagcaaaacctcagggaagagactttcactttccataaggaatttagaacacacatagctttagtgatcttgttactggctgagctggcatcactactagcaactcagctcatgtctcctgggggccctcgctgtgcctgggcccgccttggcccaggggaccattcatgttcaagtgcggctgccactttatgttttcacggcagcttctctttgctaaatgtcatggtcacgacatcaaataatgacgtgagaaatttcatacttggtttatgagccctgctagctgacttcctggtcttctgttctctcagcagagtgagcaaatcttaccaccattgaatgacagtcagtggctacagtaatgtcagggccagaggaggctgccaggagggaaggagtctgttccccaggcctgggtccatgagatgcgagctggccatccatgctttgcgtggccttccacgctcctcctgcgtgagaaggggtcagcctcgccaggcttcccttccctaaggctgatcctttcttctcttactacgaatatgttcctgacacagcatgctgaagaaaatatcaaattctagagacagcataggaatgtcctttcaagttttggatctagaccatggagttggccttccccagcccccatcagcaccggtgcttggagagaagtgactgagcctgaggaaatgctttgtgtctgtcagaggccttcacatatcaagacaattacctgggtttacttcccttattggcagaagaaaatgaaacgtttctgtaggctggtttctcagagggggtccttcccatttgcttctcagagcagcagcacatcttcatgccagcgtgatgcaaggtgacagcagcctagcccctcaggggaaggaggacacagggtgtctgcagggtgggtgtcgctcttggtggaggtccttcccacttcatgctcacctgctgcgcccatttgctcaacaaatatttattgagtaccttatatgagctaggtggatgccaggaggaaggcaataagcaaaacccagatctctacccaagcagaccttgtacttgatggacaacaaagaagtctgttagctaatgtttatttcatgaatactgactgccagaataattgtaagcaataaacaatcatgcattctcaatttctttctttccctctttctttctttccttccttccttccttccttccttcctttctttcttctttctttctttttctttctttcttcttcttctttttttttttttgacagagtctagctctgtcacccaggctgcagtgcagtgatgggatctcagttcactgcaatctccacctcctgggttcaagcgattctcctgccttagcctcccaagtagctgggattcagacatgcagcaccacgcctggctaatttctgtatttttagtagacacagggttttgctatggttggccaggctggtcttaaactcctgacctcaagtgatctgcctgcctcagcctcccaaaatgctgggattacagctgtgagccactatgcccagcctcaatttgtttatttcttaaacacgagagcacacacaggacttacttatcctgggccttcatcaggaaatgtctaggaggaaaagacactttcaatattaaccgtgacaaaactagctctgattgaaagacagatgaaaaaataaataccagtgtatttcttcctctcttttctctgaactctgtttccagctgtttcctgttttggactaattttaaattctgaggcggggggtggggggcaggggtgcagttgtaccgtctgagttcaggcagttatcgtgttggtcacaattacttgcagtcagattgtatctttagcattggataaaagttattcccaattgatgttaagagttggtaataagtcttcttccttccccaaggccagtcagcgttttcctagtgttaagcaccaggaacacaaggccacatttgtatttttgtgcacatcatttgcatacgtctgcaccaaaagcttgacccggcagagtacactgcagacaaacctaaatatcctgctcagtacctgaacaacaagtgttatatttcttcttggacttaaaagtaaaactctaactcattttagtgactcagaaagctgcatgtccccgtgctttggaaacccactagggtgctacataagaggatcctgcaggtagtgaggaagccactgtttcctgcaactgtagcccaaggcaccagtcactgagtggctgcattatctttctgatacagaaacagtaacatttcggtttgtggaagtctgagaaattatgaatatccaaaaacatgctttcaaatggttcctgagtacttggaatggcaggatcacttacttgaacaacatttatttttcaatgatttgaagacctaggtttgctgaccatattttccaataatatatgtctggaggatattactaatgaaaaatgagagtttaaacttaaaaatccaggcttcaaaaattggctgggtgtggtggttcatgcctgtaattccagcactttgggaggccaaggccagtggatcacttgaggtcaggagttcaggaccagcctggccaacatggtgaaacctgtctctactaaaatacaaaaattagctgggtgtggtggtgcacgcctgtagtcccagctactcaggaggctgaggcaggagaatcccttgaacctgggaggtggaggttgcagtgagcggagatggcacccctgcactccagtctgggtgacagagtgagactctatctcaaaaaaaaaaaaagtcacctggaaagatggggagaaattgagatagaattagattgggataaatggaaagcctgctttaaaaaaacacaaaacatttccatggccataataggagcaagccctagttaaagggcatctgttacatgtattaggagttgggagggtgcaggttagtgacctcatgttgaatttgagccacctgtcaggtattttaaaaatgcatatggtcggccgggtgcggtggctcacacctgtaatcccagcacttcgggaggccaaggcaggtggatcatgaggtcaggagattgagatcatcctggtgaacactgtgaaaccccgtctctactaaaaatacaaaaaaattagccaggcgtggtggcgggcacctgtagtcccagctactccggctgggctgaggcaggagaatggcatgaacccagggggcggagcttgcagtgggtggagatcgcgccactgcactccagcctcggcaacagagcgagactccatctcaaaaaaaacaaaaaacaaaaaacaaaaaatccatatggtcggcctggcgtggtggtagctcatgcctgtaatcccagcactttgggaggccgaggtgggtggatctcctgaggtcgggagttcaagaccagcctgaccaacatggagaaaccccgtctctactaaaaatacaaaattagctgggcatggtggtgcatgcctgtaatcccaactactcgggaggctgaggtgggagaattgtttgaacctgggaggtggaggttgcagtgagctgagatcgtgccattgcactccagcctgggcaacaagagcgaaactccacctcaaaaaaaaaaaggttaaatatagaattgaggtcaagggtctgggtacccacattcagctctgggcaggcaccatgagaatgtgggggtccatttggaagtctgggggtgtctactgagatcgagtgccgtcatggagggctcgaccagagaacctggggaggaaaagcttccaagaggatgaggggcaaggagtattcaggaatttgaagggctgtcattgagaaattagatttattctgggaagctttaaaggtctgaggtaggactaaggggtggagtttgaagagctgcaaatcttggtccaatttttggtagactgtttccctattaaagtgacagagatgtggccccatgaggtgagctctggcagtgtgatgattaagtagaggctggactgctgtaggccagaatgtggctgccagatttcagaacctcaaggaggctgcaccgcctgacgtccaaggatcctttccacttcaaggtttatgaccttggcagagaaaataggaagggagagagctctgagatttaccggatcaaatccttcatcaggagcccctcctctggactcagcagcaagagtgtgagactcaccagaccctgcttcagctcttgggcccatgttgaggcccctcagtcttccagggaaacctggtctctagaccctccctggaggctgtcgtttagctgtccagcttcaatgactgggtgacttctgcccctatagggaaaatccactcttctttctgccccagtcctcctcccaacagccaatctatccagaaagctctccctgctgcccttccctgccacccccagtggctgtaccaccaagttgagctgctcagtgccctgcacaccttcacatgtgccgtcatttcctcatcggagctgtgctcctggaggacactctccctgtcaattcctttctcaaatgcaaacaccccactcactcccaaggtgcctagaatgggatttttaacatctcaggaattcactgaagtgagttagctggtttttgtcattttagaaaacgatttcaaacaaagatttctgagaatttccatctgatgggaaagacgatagctactgaatgtttggcagagttccaagtcagtcttgctttttattaatacttgtgacagctgtacaaggtggagggtgcttgctgtttctcagatggtcacatggcagctcagaaagataagctcccatgtctaggcagctactacagaaagctaccccaggcctttctgtagggacagtccagtgtcctttcttggcttcagattgctgccctccgtctgcagaacagggactaaatttcatcgccatttaactggtgagcataattcaagccttcatctctggtagcagcgaggcttaagctctcagagctatgaaaacggaatctggctgaagatgttgagtgactctggaccacggctccctcttcagccggtcacaggccaccccagcctcctccccggagtagcaggagtgtttctgagccctagattctgtagagcttggtgctgggggttttccgggggagtgttccgtcttttatcataaaccttggcaaggggtgcgtgggtggggcgccactgaaaggcgcctttgtcctccttctgaaagcctgaagggaaaacgatgaaatcccacagaagaggccgctggagccaggctgggcaggcgtgctggctgcggggagaactgcgggctggccttgcgatctggttctcatgtggtcccctctgcagatggccttgggaagaaacaaaggcctccttgaggcccctgcctgtgatgcggacagctcattttcattctgctgtggtttcccgggtggcctcgttgagcttcactgttctcgggagccctttccttgactaccctttgaacagaggagagctatgcaaacacgctgcgagcggccttgagagcccgaggagggtctgctttctgggcccctgcagagggcaggggtcgcgggctggtggtctgccccgcccagagagaaagggccttggcttcccctcattcttcgttctgtgttagctctttttattgcaaataattaattaaagtcagtacagcaagagtgggaaagtggttaatgcaattgccaggtccagattcagagggatgaggcgccgaaaggaaagacaaccttgggatcgcttccacttcctccacttcgcaccgcatggccggcaagttggcggctctcgcctgctcccagttttcccggagttgagtatggttgactctgactggaccaggttgggtcacgtgtcggccctgagccaatcagcttgcccagagagatgatgcgccctgagtggtgggtgaacctggtgataggccccagagtggccagagaggaagggcatgcgcacaccatagacataggcaacgtggtggacgacatgggggctgggcgggggtgctgctcacccaccttgtgcccagtgctttcccttccccttgtccatggtcccctagcttggggagaaagcagggtgcttgctctacccgccagtgctgtctcggggctgcagggagttgtggctgccctgcttgcggtcttcactcccaactcactgtggctttgcagagctggagtccgccctatctgggcttgggggtctgctccctgagagcattatttggtgcccctcgactgtgttgattcagaaatctgggacctgttgtttctcgactaaatgtcttatgagatcagtctttcttttggaggcaaacattttcggaagttttggaaccatgatgatctatgcctcagacacttgtggtccctgagaagctgctgctggaaaaaggggtccccatccggatcccaggagagggttcttggatcatgccgggaaggaatccaaggcgagtggcagagcgcagtgaaaagagatagtttattgaaagcttctcagttacatagtagggcatcctcagcaagaggaggaatgcctctgttttgtttctttcttatataggggtcttatctatgtaaaagctaagctatgtctccctgcgggtaggctgacgaagtgacatttattactttgttgattgaaagaaagctatccttggcattttagtgcataagtacatcaaagcatgcctataatcatcttaaaagcatatattatgcaatattggggcatctggacattctgttgttgcaagagtttgtctttgcaggtattaagctacttcgtcagctgtaaacatcttatgactgtgggtcatgactggcaaggaatgtgccttgctagttttaagatggaattgattctaaaatggtgtcaccatggctcccctacgctcctgttcccctaaaaaaaccctgccgtaagcggacttaaggatagccttgtcaccctagcaatgtggcagtgaatctctgccaatagcaatctacaaatgttaaaaacttttctttttctggaaaagtactttccatgcattaagtattcaagtgcctgttttcctggcactgggctggatgtatatgacataaaatttgcagtattgctccacccccaaactgctctgcattttggccctcctccatctctgatggctttctcttccctgtgctgcagggaactactggagaccacgtgccgcctggccaacacgctgaagaggcatggagtccaccgtggggaccgtgttgccatctacatgcccgtgtccccattggctgtggcagcaatgctggcctgtgccaggatcggagctgtccacacagtcatctttgctggcttcagtgcagagtccttggctgggaggatcaatgatggtgaggaggtgggcatggggagggaggaaccctggagttccctgatccttgttcctgggggcctggccatcagtgtagagaccatcagagtgcagacattaatgtcacacagacaaatgacagatcgtactagggacaggcacatggccgaatgagaatttgttctgtgggctgagatctgagtgcattggatttagccaggtgaaaaagggacagttccagttggagggaacagcagaggcacaggccaagtggaggaggagcacagcatgagggcctagtgcaggtgggtgtagtgcggcaggagggaagtgtggaggtgggataaggctggagatgcacagggaaggttccacaggtcaacaactggaaggcttctatcctgaggagtgaaggtgtggaccatatttggggatctggagtcaggtgaagggggtctttctgtctgcatgtgggtcagtgtgttttggacattgtgcagaacaataacttccttgttttgctgttgtcaaaggactgagtgtctggatggtggccctatgtccatgcagtctgatctctgcaccctgctgtctcctagagggagtccctgagctggcttcgcaaggcaggtgccaggttctaggtgccattgagaattcttgtgcctcatagaaaatagaactaatgggtagagttctcagactcctgttgacctccctctgtataaaaggctgggaagcccttccgcttcctttcagagtttcttcccccacgttcaagggtgatgctgctacctctttctctttttcttcctctctctagaactctgtaataccaactgtgtaccaggcactgttctaagcactctacaaaggttatgtcctttaatttaccttactcttcataagtattttatgcaataatactattattattcccctcccctaaaattactgttgtaaccatcttaaagtgtacaattcagtcacattaagtacattcacagtgttatgcagtcatcatcagtatctagtacctgaagtttttcatcactcaaaatgtacactttacacccattaagcagacattctccattcatccatgttgtggcatgtatcggtatttcatatttttaataggtgaataatatgcattcattgatggccatttgggttgtttccattttttggctattgtgaatagagctgttatgaatgttcatgtataggaacacctgtttttaattttgggggtatatacctatgagtgggcttgctgactcatgtggtaattccatgtttaacttatcaaagaactgtaaaactgttttgctaaggagatgcaccattttacatttccactaatagtgtatgcaggctccagtttctctgcatcttgttgtttttcactttaaaaaattacagccgtcatagtaagaatgaagttgtatctcattgtggttttgatttgcatttccctaatgactaataatattgaacatcttttatgtacttgttggccatttgtatgttttcactggacaaagtctacttaagctgtttgcccatattttaattgcttgcttgtctttttgttgttgagtatgtaagttacttatatattctgaatattagacctctatcagatatatgatttgcaaatattctcccattctgtgggtggtcttttcactttctcagtagtaaactttggtgtataaaagttttaaattttaatggagtctaatttatctattttttattttgttgcttgtgtctttgctgtattatttgagaaaacattgccaaatctaatgctgtgaagattttttcctatgttttcttttttttttctttttgagatggattctcgctctgttgccaggctggagtgcaggggcatgatctcagctcactgcaacctccgcctcctgggttcaagtgattctcctacctcagcctcccgagtagctgggattacaggcacgtgccactgcatcgagctaatttttgtagttttagtagaaacaggatttcaccatgttgaccaggatggtctcgatctcttgacctcgtgatccgcccgcctcggcctccctgttcgtatgttttcttcaaagaatttaagttttacctttttacatttagatctttaattttgagttgatttttgtacagggtgtgaggtaagggtccagtttcattctttgtcctatggctatccagtggtcccagcgccatttgctaaagaggctgttcttttccctgttaaatggacttggtactcttgttgaaaataatttgaccatatatgtgagggattatttctgggctctctatcctattccatttatccatatgattacctatgtatctattattatctcagtatcaaactgttttgacactgtagctttgtaagttttaaaaccaggaagcgtgagtctcccaactttgttcttcttttttcaagattgttttggctcttcttgctttcttgtattttcataggaattttaggattagcttttccatttctgcaaaaaaagatgttgggattttgattgcattcaatctgtagaaaaattggaaggtattgccatattgacaatattaatccacaaacatgggatatctttccatttatttaagtattttaaaatttctttcaacaatattttgtggtattcagtgtacaagtcttgcatatcctaggctaaatttattcctaagtatcttattcttttatgaatttttataaatggaattgttttcctaatttcctttacagattgttcattgctaatatgtagagatacagcaatttttgcatagtgatcttgtatattgcaaatttaatgatttattagctctaataaatagtttttttgtggattcattaggatttatacatagtagatcatatcatctctgaatatagttttacttcttcttttccaatttggatgtcttttatttcttttttttttttttttttgcctgatcactctggcaacaactttgtttacaatgttgaattgcagtggtgaaaagtgggcatccttgttttgttcctgatcttagggggaaggcttcagtcttttaccattaatatgatgttagctgtgggttttcagatgctctttatccattaagttcccttctattcctagttttaagtgtttgatcatcaaagggtgttggattttgtcaaatgcttgctctgcgtcaattgagatgtgttttttccttcattgtagtagtgtgatgtattacagtgattaattgttgcatgttgaaccacccttcctttcctagggtaagtcctgattggtcatagtatattctgttaatatgctgctggatacagtttgctagcattttgtggaagagttttgtatcattgtttatatgagatatttgtctgtagttttcttttctatagtaatctttgtctggctttagtatcagggtaatgctggcctcataaaatgaatttgaaagtatctcctcttcaattttttggaagagtttgagaaggattggtgctaattctttaaatatttcatagaattcaccagtgaagtcatctggttctggtctttagaaagggaagaagatgggtaaactgagacacagagagtttaagtgacttacctaaggtcacatacctagtaagtgacagagccaggagttgaacacagacattctgctgccatagttgatgctttcagcattatgctaagctgccccttttctctcttgctggtgtggccatggtcacccagtgcttctgttgagattgtttgaaacaagcaatagcagttgactcttggtgacttcatcatgtggggatttagtagctggatgctggggcagctcccagaacctcagaattcctaaacaaccaagcatgggagggcaggggccatgactctgtcctgaagaggactctgccctgatatccttcagcctttttgtgcagctctgcaggtaccaggttcctggggacaagattctgttgagatgggtatctgtgtcctgttgggtcaatgaggggctgttttggttttctattgctgtgtcacaaactactccaaaacttagtgtttaataaaactgaaaacaataaattttagtattctatttcatgggtctgtgggacaggaatcagatggggacaggggaatggctgttttctgctccatgacatctgggacattagtcaggttgacttgaagggttggggactggtgggcctgtctttctctccacgtggcctcttcacatggctgacttgggcttcctcatagccttgcagccttagcagtcaggcttgtcacatggcagcacatggctccaagaggaaggaaatagcaactgccagtgtcctacagtccaggctggcacaggcctggcatcactcttgccttactagattggccgaaccagtccgtggccattctagattcaaggggaggagacctggatcctgcttctctataagagcaggtgaaagaatgtgcagccatcttcagttggccactgggaggtgggtgtatattgtgagtctgaccgctaggctctcacatgtctgggcagccaccttagtcagcaggtgcagttccagagttcagtcccctggcctggcttccagggttggaccatccctcttcatttgtcttccctcttgctttaggctgcttgaggagtggagagtgttgcaggggagggtagaggtcaggagaatggctttgagagagactgtgggggtagaataatgacccactcagatggccacactgtaatcccccagaagctgtgctatgtcacttgcatggtgaaagactttgcacatatgaataaggcaataggatatccaggtgggctccatctaatcccacatccttaatgcacagaacttgctccaactagaggcagaggaagtgaagcagaaggggaggtcagagagattcaaagcaactttacccgccgttgctggctttgaagataaacagggccacgaaccagggcaggtggtggctgtagtcgctgagaatgacccctggctgacagtcagcaaggaaaaggcgaccttaatccctcagtcgcgtggaactgagttctgccaaccactgaaatggcctggaggtggatactcccccagagccaccacataggagccagccctgtccttgactttggccttgtgagactctaacagagaaccccaccaagcctgtccagacgacagaactctgagctaaaaatgagtgttctgagccactaagtttgtggtcatttgttatggaagcagcagaaaatgaacgcagatgctggtacctgctcaaaaccagggagagaaaattgaatcctcccagagtggcatgtggttcctgccagcacccatgctgtggcccagccttggagggcgccagtgggccagacatgctcatggtgctcagaagctcctgggtacttcctagaggacctcctggagagcctactgggcagggaggccctggacaggtgcgagtcaggagtgaggtgtgcgccttgggaggtggggaaggaactgcctgctgtgtagtgtgatttcagcatgttgcatgggctggggtcattgtatcgtgagagcttctgacccccatgagctttctttgtctcccgtccccttgagaaaggttcattccttcctgctggtccatctcccttcctcgcccatagggggcttacctggaccaacccctgcttggggatgtaggtctggaaagtctctgataggctccacccaactgacttggtttccccaggtgagctatcgctgaggcttgaaggccaaagagtgtgtgtagccacggctcttggtgccagatgcaggggtggctgcatctgggcaggtctagggtatctctctgacccccggatggtgctgtgtgtgctggaaaattctcagggaaccctcatggccatgacatctccagggctcttaggaggagaaagggtgggcctgttgtgcaaaagtgctttcagatttatttaggtaggactctcccagaggggacattgaggccagagtctgtcttggaagtgtggtagggcagtggtggctctggacgggaatgtggcacacatgcctcaaatggctccatgcaaagggtagggagttgcaggatttgtaccccaattatggagagccattggtcgagggttccccagcacttctgcccatagctctgcaagaggcctttggtgcagaatgactgaaaggcccaagggatgtgggtgaggccctgccagtcagggtcacagctgggcatttgtcccaggctcttcctgaggggctgtgtagtaaccccccgcagctgtgatccctctgggtcatcccgcactggggcacagcgtggaggacacctccttttcctggggtcttgaggcccactgtgcgtgcacccctcttctctgctctgggcctacccctaggttagccatggaagctagggtcctcctggcttccccctgggcctggctgagcaacattggtcattgaagagcaggtgtgggatcaggagggccttctcctgaaggtaaggtgggcaggcagctcccagtcatccactggggtgtggtttctgatctctggacagtgaaggctcttggcccacacaagtcactctagacagggcctggccacatgggacacctttgggcttggcctctggttgtccagctttcttgttctctgcctctcggtatttctctgtcaccttgattgctgcaggtggcatgatggcctctttcctggggtttgctcctgggcagacaggagagaaaggtggaagtctggttgggaaattgtctttatgctgctgactcaaggaggaagagctgagcttcaaagtaatttatctctggttccttcccctcagcctcagaactggacaaaggcctggtgcttcttcatggcacacaaaggctggagagcaggcagcccctcactttttccattgagtcttttactcaagattggactgagtttctcacactcctaggcctggatgtcctatgtgagtcagagctatgagggttaaagtcgggaggagactgatcagaaatgtctgtgttgtctctgttagccaagtgcaaggtggttatcaccttcaaccaaggactccggggtgggcgcgtggtggagctgaagaaaatagtggatgaggctgtgaagcactgccccaccgtgcagcatgtcctggtggctcacaggacagacaacaaggtccacatgggggatctggacgtcccgctggagcaggtgggttacctcgctttgcacagtttgaggagaggtcatatcaagttagctggctctgaggcttctcgggttgtggttctcaatttgggttccctagaggtgcccagggttcctctgtggtatttggtgagcttgagtcctgactgggaagataaaactcctatacgacaagcatgttggaacacttactgtaacacaaatgcttgcacccacgcttttgttttgtgtcctttccacatttggaattgaacttggacaggtcagagcaggtgaattctgaatcctgtgtgtggagtcctgctgcggagggggagtgctgctctcagagaggctgagtgccctcggtgggctgtttgtttcttctccctgccaggaaatggccaaggaggaccctgtttgcgccccagagagcatgggcagtgaggacatgctcttcatgctgtacacctcagggagcaccggaatgcccaagggcatcgtccatacccaggcaggctacctgctctatgccgccctgactcacaaggtacaggcctgtgcgggcggtgctgggcccttggcagggatccaggcaggggcagggctggaagtcctcctgctgcagagcgaggcctgtaggtgtgagaggtcagtgtttcttcctggcctattcggggcagggccccctcgagtcctcccaccctacagctcctcagggccctggctgcctcaagcccccactgcactgtctggaaactcccagataatctgatcatgtaacgcggcagcaggacactaagggccattcgcccaaagatttttaaaaactctttttagaacagatagagaaaaccacccaaattaaatgcatggcttaatgaattattataaggcaaatgccactttgatcaagaagtggaaggccaccggtttctcagaagccccttccaggcccatatggccacagccccgtccagcatgtcttgatgtgtcttgtgcgcctgccctgtttttattttgatagttttgtgacccatatgagcatccgtgggcactgtagcttactgttgccaattaaaatattgttttttcttttgttttgttttgttttgttttgttttgttttttcatggagtctcactctgttgtccaggttagagtgcagtggtgtgatctcagatcactgcaacctttgcctcctgggttcaagtgactctcctgtctcagctttctgagtagctgggattacaggcacctgccaccacaccctgctaatttttttttgtatttttagtagagacagggttttgccatgttggtcaggctggtcttgaacttctgacctcaagtgatctgcccgccttggcctctccaagtgctggaattacaggtgtgagccaccgtgtccggcctaaaatattgttgatatgtgttttaagtctttttaagcctatgctcccccatttccttacacttggccatagtcacatccagccatttttctctggtgtcctttggtctgggttgtgcctgttgtccctctgcctctgtgtttcctgcacgtgggcagttagatcctgagatgggatcaggctccactcagctgctgtggaagaataaaggggattcggatgtctgtcctctcatgctcctcgaagctgatgatgcttgatgccattcttggccttttttgcttttattttttgtagttcttaaggggtttaaaaaatcgtggcataaggtaatgcaaaaaggtgtccatgtgttaaacgtacaactagacggactctgcagtgtgcccacctgtcctgctgctggaggccatttgaggagccagctgcctctcacagctatggactgcagcctatgcatgcctatttcctagtgacctggtgtgaacatggtggagtggggggacaagctcctgatgctcctttcctgtctctgcagcttgtgtttgaccaccagccaggtgacatctttggctgtgtggccgacatcggttggattacaggacacagctacgtggtgtatgggcctctctgcaatggtgccaccagcgtcctttttgagagcaccccagtttatcccaatgctggtaaggatggtgaaccctgtttgggaccccatgctggtgtcaggggagagagcctgaggctcgaggcttgtggagaggttcatggaagggggacgcctgggttctggtgagggtgtggctctccaggtcctgctgtcgaaatgcccggtggggccaggccccaggtcttcagaaagatctgacaggcagcagcagggagtctgacttggtgctggaggacatctcaaggcccctgctcctgcactcctgccctctgacttaaactgccggcctcaggccatcgctttggcatccttctcacctctaggctgcttgcccagatccagccctttctcaaagccagggccagctgcccgccacttctgtgtccccagccctgcccctgagccttcagggctgtccctcaaaccatgttaggcatggcctagaaccatctccattaaattgagatcactttgaagacaaggtgatgactggctcccttgggcatcgtcctcccacacagcacagtgtcttcaaatattttctttaatgtaagcagatcatggtggctctgcccaaaggctgctgctccagtgttccatggcactgacaactgtgcatggactgtgttatcacctcccagtgctccatccctgcctttgggggctgggtgtgctcaaggaagaagttgtaggggcaagaccagggattaagggccatggcccaggtgctgtctcaggccaccacttcagcccttagaagctcagtgttccatgtggaggggatggtgtgggtagtgggtttacaggaaccaggggtgtgcatgccgggcacatggccctgctccctgggacacacgcagtggcagctgtactgtcaccaggggaagcaccagtcaccactttagagcccatgtgagtgtgatcgagtgaaagctctgtgttaatgctccatgggttattaaatccacgtagtatcaccttgaactaggccatcaccctaagcctggtgaagactgttcctgaatgtgccgcccatggatctggggagtgcttggaggagagcggccattggggacctgtcccatggggcttctttccatctttcactggcgggggtggggggttggggggatccctttcatatggacatatgcgcgtctgcacatgcccagcactcaggaagtcttggctgatctctgagtttaaagtaaaccatgtcagctctcctgctgacagtgaatttcggcctttctgtaggtcggtactgggagacagtagagaggttgaagatcaatcagttctatggcgccccaacggctgtccggctgttgctgaaatacggtgatgcctgggtgaagaagtatgatcgctcctccctgcggaccctggggtcaggtgagcggcctgccctgcagcaggagaggttgtgcttgccctagaccctcagagccaatacgggcttcagcaggacttcagtcatgaagctgcccggctttgtatgtgtgaattcacgcaatgccagaccggatctggtagaaagcaccagcacctcttcccacctgtaagctcctccccagagctggcagcagttacctgtctggggaacaacgttccagacattttctgtgccgttgtttctgtgcccaatttctgtagcttaatcttcattaggaatacttacccactcaataagttaagggtcaggtcagttctttagtggctgcatgggatttaactgtataacttagctgggtgtggtggcaaaggctgaggtgggaggattgcttgagcccaggagtttcaggctgcagtgaactaggattgcaccactgcgctccagcctggtgacagagtgagactcagtcgtctaaataatagtaataatagtataactacagtttgctaaacactgccccatagttggaccttttgattgtctccaagtctgtggagtggataccatcctgcacttttgccctgctgttactgtagacatttccaggcagacagttcaaagcttaggcctattggtaatgttgatggatattgccaaatcacatggaaacattttggaaatgtgatggtggcatggtttcgacagtatcagcagtgtctgtctttcgggctggtgctgggagggactgggtgctggtgactgctgttctctctcctgtccctgccacatttcatgtctgccttgacgtgtggtcacgcgtggtcagccacctgcttggtggcttttcactggggaagcatgcagggcagtgaccatggaagagtgtcccattctgccacatacatccttgggaagggagcatgtacctcccagtgaacatgtgattccactactactgggtgaccatgaggccatgcgggcatccgggccacaggctgagaggcacagcagctggggctgtgccctgcagagctcaccacttgttcccaaatgtgagatggggatgagacctacctacagggtggcgaggatgccacagagggtcagatgtgagccttagtataatgttcagcatggagatgattaatggagagagctcctgaggaatagcaggcatccaatgactcctcctcctcttttcccttattttccccattaacagtaaaaaccttctgtttctcaaccagctttctagattaaaaagcaggaggagtttgaatactattaataagagcaaatatgtattaaatgcctttatcttcacatcagtcctttgagcaaacagcagatgttgtttcacattacagagaaggaagaggaggcacagagaggtcagagaaccggcctgaggtcactcagcaagtagggcagcctgtgttgaacgcagcacttggttctagagtctgtaaaactcactctgccccccacctgattgatgggctctgtgcccccaccctgtaccctcaacaggtcccttgccatactgtcccctccacctctcagaaagagtatggggttcctttctagatggtgaatcttagtttgctttgtgctgctgtaatagaataccctgaaactgggtgatttataatgaacagaaatttattggttcacatttctggaggctgggaagtccacatcaaggtgttggcatctggtgagggccttcttgctgcatcgtcccatggtggaagggcaaagagaaggcaagagagagcaagaggaggttgaactcacccttttataatggcaccaatcccactcatgagggtggaaacctcttggcataatcacctcataaaggttccacctcttaatactgttacaatggcaattacatttcagcgtgagatttggaggggacaaacattcaaaccataataagtggtgagtttgggtggtctctcttggcatgctggagctgggcttgagaggcccgtgtgattctgactgcctgggccatgtagtgcttgtggactgggaacaaacagcggggtggccagggccatagaaactcgcccagatcctctaggtgttgtcagcagggccacctgagtgggccctaggcattaggtggggacagggctgaagggcaagatttggttttccagatacactcatgggatttgtctcctgaaggaaggttcacggggtccaatgacaaggggtaccgccctaagtgcatttcaggaaggggtgtgctctggcagctgcattagagtgggatgtgtatcccagcagcctctgcctcacctaggggtccccacagacttggaacacctctgagccagggggccagcccccagcagaggctcagctgggttttgtgtatttagctggttgataggcacattcctattcctgttgcataaccggttctagccgcagagccctgcgggaggccaggtgctaatcacacacctcgctgttctgttctcggtatacagtgttggcaggcagcgtggcgtcttgtgatgtcttgcacctggggctcccagcacctcggagcagtgctgggagtcagtgtgttccacaccttggccagggccagcgctgtgctggcacacctgtcggtgcaattccacagcccagacccattccaggcagctgggatcagccctcatgacatttaatccgttgagtcgtcagaatcccactcactcaagacattccccctagatttgtatttctcaaagcttttttaaactttcaatttcataagtaatacatggatacactcttgtgaaaagaagaaattggagcattgtacttaaagctgatgtccttaggagctgggcgtggtggtacgtgcctgtagtccctcggctacttgggaggctgagatgggaggatccttgagccccagaagtcgaggttgcagtgagccatgatcatgccactgcactccagtccaggcaacagagcaagatccttgtctctctctctcaaaaaaaaagaaaaaaaaaaaaagctgaagttttcctcgacctctgctccaggggttgttgctcctgcgccttcggccctgtctctgcagttaagttcctgtagtggatgcagctctgttaaatgacgttttctttaacaccaaagttaccacaccgtgctatgatgctgtaatgtttcttttaagattgtagaatctgcatttttccacacggacctgctttgccgtggggattaccctggcttgtgtggtcacagccccgtggctgggtgcaggctgtcgcagtctcccagcgtgtccaccagcgctgcggggcatctccctgccccttgtggatgttctgagtgcaggtgtgacacacaagacactgagctgccaatgtggccagcactgatcatgcagcatggatgcgggggccactgctgggacaggctgtgggttgtgagtggtcctgagcaagaggcaaccaccagcacgagagtatttcagtgttttagtgatagcacgtctagcctggtgagttctggctgagtgctggcctggtgtggaaatgtcataaggtagacactgagaatcctagggtgtacacatatcttcttcctttctattgagatataatgtgtactaaagggtacagatgttaagtgttcaacttgagagatgtttacgtgtataagtgctacagaaattcctagtccccagaggcccccttatggctcctcccagttacgagagttacccgaaccatgaccacagtgtggcctgcatcaccacggacagatccggctgcacttgaacctcagctgggtgggatcacacagcacacccctcccttgcccagcgtcatgcttcagactcaccagtgccgctgtgggtcgtggaggttcgccatcttctttgcaatgtggcgttcctctgcaggagcgtgccatattgtatttagccacctactcctgagggatgtgtgtggtttctaacatgagcagagctgctgaggacaccctttacatagccacttctggtggcatctgcagtcatttctgtggggtgtacgtcaggggtcatgttttgaggtatttagctgtagtagattctgccccaagcagttgctcagagtagttgtattggttgtatggagttttaaatgttaagagaaacatccagattgctcctcaaaattgctgaaccaaactatcctcctaatggtgtctgtgaaatcctgttttccccacattcttactggctttttgatatccatcatctaatggtaaaaacacatcatggtcatgtgcatttctttgatgaccataaatacggtatgtctcactgcattttcaggtctccttgtatgttcttcaaaaataaaaatcacggagctgttttctccttaaaaatctctttatttggctgggcacagcagctcacacctgtaaccccagcactttgggaggccaaggcaggtggatcacctgaggtcaggagttcgagaccagcctggccaacatggtgaaaccccgtctctactaaaaatacaaaaaattagccgggtgtggtggcaggcgcctgtaataccagctactcaggaggctgaagcaggagaatcgcttgaacctgggaggtggaggttgcaatgagccaagatcatcctgggagacagagtgagactcagtctcaaagaaaaacaaaaacaaaaaacaaaaaacaaaacttccctttggtttcaggtttatttgcagcctgttaacatctttttctttctgtgtggtttcagtgggagagcccatcaactgtgaggcctgggagtggcttcacagggtggtgggggacagcaggtgcacgctggtggacacctggtggcagacaggtgaggaggcctggggaacaggttccggtctaagtgctgggtctgcagggtcaggtgtgaggctgggactggggtccaagctctcaacagcaggtgcgatagaagacgcttcaacgcccgagactgcggaaaccctggagcctagagtgagggaactcagaggtcgcctggctgctgtttcccacctgtgggacctcttgtcacaacttctctgaggctcggtttcctcctttgtgaggtgggggcgccccccacacgcctgggtgagggtgaactgaggtgacacagctcagcttgctgcccaaggcctggtgtgcagcaggagctcaggggccgtgtcccttcctagtgcccctttctgaacaggggaacatctgatgagacaggccccatcttctaagggagcatgagtctaaatttaaattttagtgggaaaaggaatttttcctgtgacattttgtttggatttgtccccccttctcttgggtatctgacttattaggaggcttggggcgagagaccaccatagatgtaatgaatgtaactatctgagggctcatcctcaagccagaaaatgaggcgttcccatgggacagtcccatccattcaggaaaacctgggacagagattctctagctgagtcactggggcatttccctggtacaggctggaaataatgtgagggtaggatttgagagcatcttttttcgttgttgggttcatgtcaaatgggcgctggcccagaagcagttctttttctccgtcttcatgtgcaagtgggtgggctctgccctttcccacttcaagcaagggcctgacatggcgagggggcctgcacctggctgtgggatgccagagctcctggggctgaggccactgtggggccgcctctcatatccacagtggagggcaccagacccacatctggtttgcctcaaagatcgttgtgcccctgaggcgtttccttgcccacaacagggacagtcccacctaccacccactctggatacacgtatccctgggtccggggccgattatgcatttctttcttgtcatacctgcagaaacaggtggcatctgcatcgcaccacggccctcggaagaaggggcggaaatcctccctgccatggcgatgaggcccttctttggcatcgtccccgtcctcatggatgagaaggtgtgtatgggcctcccccacatgggggtcatgtgcttgccctcccttgtccctgcctgcccagcccagctctctcctgtgtgcccaggtctgtacctggcaggaggctgctgaccttgcagcgttcactgcagctggtatcatgcactgggtagtggccacacaggtggcttggggccctcctcaggggcagaggggagagctatggacagctcccttgagggcagggcttgtcattttttggcacacttctcacccagagcctgccctgtctcacttgcatgtccggggtctacagggcagcgtcgtggagggcagcaacgtctccggggccctgtgcatctcccaggcctggccgggcatggccaggaccatctatggcgaccaccagcgatttgtggacgcctacttcaaggcctacccaggtgagcaggctgtcagggaccctctcattccttttcagctgactgctggaatcttattctcagaaaacatttttaatgggatttgagtgcagcgtaacactgtggccaggaataggtgctcgcgaggccagagtttgactccgcacccctctccctttgctgtacctccctggctttccttatcttgacagtgggagtgattccccactcggggactttcttggggctacttaggtgtgggtgtgaagtcctgcactgcagccaggcccatggtaggatcctgttagctacggctgggagttttcttccagtttacttttattttttcccagtttccctttttgtcgtaaacaagactcagtgttttggagaagcatcttggatgtgctgcttgtataccttctgctccccaaagtctcgatatctcggagccacctgcccatgctctagaacatagggaagcatcggagttgcaaggagggccgatgggcgagacttcagccgcgtgctgggctgcagagcttcacgcttactgaggttgggacatgggtcctggctcagggttcctggtgctgaatttccctgctgtggtgcaggctattacttcactggagacggggcttaccgaactgagggcggctattaccagatcacagggcggatggatgatgtcatcaacatcagtggccaccggctggggaccgcagagattgaggacgccatcgtgagcacaggctgggcctcctccttcactcctacacctccatgatgcccctgtggacctgcaagttggggtgggagtccctggcccgagtcacttctagcacccggggccgccacattttgcccttttgttctctgttgtacacaggccgaccaccctgcagtaccagaaagtgctgtcattggctacccccacgacatcaaaggagaaggtgagtgtcctggagatgagctcctccctgattcctgaccccacacccattatgggcacctctgtacgaggagcagactctggagagtggagtgataggggatactgtgggccaagctctcagtgttcttctctctcaagtggaaactgtaggggaggaggctgaatagcactcgtgttcggtcgggtttctgaaatgccctggttctgctgtcctttcaggacacacatccacagtggccatgacccagttgggcttggctaagcttggggggtttccccttctgtccatggtgtatctggtggggacaccgtccagccccattacagagagtttatgagaaaatgtccagcctcatgtatcctcacgggcttggtcatagcactcaagccagctctgcagccgccacgcgtgtgtgccagagtgtgctctggagtgtgcaggctgtgtgctgcgctgggactctttggacgaatctgacctgtggttcccactgcacagcgacatgctgggggaatgcagaatgagggactagaatggcctttaccaaggccacgctttgtttcgagtctgccagcttcttggtggctgggtctgggaaggggcgggagcacctaggtgttgcaatgccaggtccatccaggcacactgcctggcctggcgtgacctggacacacactgaccccatgccagggcactgctgggcagactggcttctcctgccctgcccagtggcttggggtcaggcttgccctcccgctgggaggccaccctgtgtcacagtgtgtcccagatgtcaccttcctccctgcacttctatgtgccgttattccattatttacttaaatgctctctttaaattgacgcattgcaagattgagaatttgtttcagtgctttacaaacagcattttcagttgccatggaaaggctatgctggtaaggctgggatgtgggagagagctggtagggacccctgcccggtgacatgtccagatgtgatcaggagggtcagagaggacggagacgaggacagtttctcaggtgtgactagggtaacttagtgcccccctgaggttacctcgctctggcaggagcctgggcccctcctctgaggactcctgcatttcacatctctgggctgggggtccacagggcactgacgtgtcctgggatttgaaagccccatctatgtctgagtccagtggctgagccagtactccctggggccactgagaggggtccgggcatggtccactgtgtctggggattcagcagcccctggattgaactccataaagcaagtgcaagatcaaggaaaggacaatggaagtgacctttagacaaacgtttgggcatcacaatcactgtctttcatagggtggcctagccttaggtctgttggggtggtgttggggcatggtctgctgtggacgctgctgcccagggcacgttctgcgtgtgtggagctattgcaagtctggtgttgccaggcttcttaatgtctgccagatgtgtggggataatttgtctatcatgtgtatgatgatgtgcattttcctgatttctaatgaatttgagtatccattctataattatgaagagctgatgaacagctcttggttggctctaaagctgcctgtgaatatcgtatatttgtccccactctctctgttttgcagcagctctgaaaaagggcagcccctggaccttgtctaggacctagacccagcaagcctctggtgctgctggccaggctcttgtctctcttgtctccagtgtcctgagccttgcctgcctcgtcctggctcttaactggctcctccacccatgtggaaggtttcctccctccagctccatcctcagaactcaacagtccaggcccacttctgatcccatatcaacgaccaagatgagaaaaacggtgttctttccctcaaagatctaacagcctagtggggtggcagcagggggactgacagctgttcccacatagcatgtgccataaactagattcatgggtggagtcaggaaaggcttcacagagcaggaggtggctgaactgagtcttgagggatgaataggagttcgccacatggatataggaaggcctttcaggcaaaggctgtaggtctttacagatcatagcttgttcagaaaaccaatcatccattcatgcacttaacaaccatgtgttgagcacctcctgtgttccaggcatggttctagatgctggggacacagcagtgagtgagaaggtctctgaccccatagaggggtcaagagtagaggagagagacagacaaagagcaagaaagatgatcaccaaggaaacgacacagtcagttaggtgctacatgccagggaagaatgggtgaaggtggcatggggctggggcagatgagcagtaggagagccacacatatatagaagcttcgagggagagacagagcacctcacaggccagtggggacgggcaggctatcagggatggcaccgggatgagcaactccttatatggacaacaatcaaattagatccctcttcacagtgtgaactcttcctggaacatgccagggtactgaaaaacgaaagctagtatttatgctataatgtgggctggcccgtgctgcccagcagaactctcagctgcctctcagctgtctgtgttgtccagggtggcagcctctggctgctcatggtgctgaatggcacttgaagtgtggctcatgcagccagggagctgctgatttaattgaactgaaatagctaccctggcccatggcaccatgttgcacacacacccccaaaggctggtggtgcccatttgctgtgcatctgtgcaccttctcatggaagtctcattccatcaaaccacattatgggttatttcacagatgtgtacacagagaggggaggtcccatgtcccaggtcacacgcagccagtcagcattagagctgagatgccaagctctcagccacacatgtgcactcacctggaacatctgtggagctgttagaatcgctgccacttttcatgaaactgaagtgcatctttgggtttgcaactaaagaaaccagctgctacaatgtcactaacataggattcaaaagcccttcggatttctggcagtctgtgcatagcaccctgcctcgggagttggctccttgtctagtatttaatacatccccaaacttggctttattttcagctgcctttgccttcattgtggtgaaagatagtgcgggtgactcagatgtggtggtgcaggagctcaagtccatggtggccaccaagatcgccaaatatgctgtgcctgatgagatcctggtgagtgggcctcccacaaagatggggctgtgctgctgttcttcccacaattgtcaagtgacaatgatcttttaggagcatattactcttttccaattagcatcaaaacggacactagctgtttggttttcctggctggtggtgaggatggtgggtctctgtgttgtcatagagggagaagtgagctcagccagcttacttgtccaggaggtcgcctaggcaggtttccatgctcagtgggctcatctgtccaggaggttgcctaggcaggcctacatgctcagtaagctcacatgtctgggaggccacctaggcaggtttccacactcagccagctcacctgtccaggagttcacctaggcaggcttccacgcccagccagctcacctgtccaggaggtcacctaggcaggcttctgctctcgtatgttggcatgtgcaggctagtcacagaaatggggctgctggtgaagaaccttagggattttcattagagacatggggacagtaccagggttctccagcccctgtgtggttcttgagcacttttcctggtggcagtgaaggagatcgcagacccccaacccagggggtcagaatcaggggaggattgggctgcctcttcaacccccggcttttcattccctcctttatgaacattgcgcgctgtgactctgggtttggcggccctcagaggcggcagggccaggatccacttggtattacaggagttgacacatttggcccagtgaccagaatttcaggagacccggactcaccctaggtgaactgaactatttcaaaagacagaatgactgtcaaagatcccaaacacagctcttaatgcattgccatttgcagtgaatgggctgtagttgtttgagcatgctccatgttagcttttcaaacactaagacaaaatttttctcttaagtagttctcacctctgatgtaagacaaaacctgccaagtcccaggccagagaatggagatgaggcacccagtgggtgcttggatctgctgccacctgggtgcctgcacgtggcacagtggcaggacagacggacggcagtacggggtgaacccggcctgggtggaccctgcctggcggagagcatcggggtggatttcagcttaggtccagacagtaggaggataaagccaagacctcgggcctcaccgttctctggggtggaggcttagacatccactgtggatccccgggagggcatcccccctgagcagagcccttctgatcttaatgcagtccacgctagcacagaggctgggcaccatccacgctctaacactgtgcctgttccttgccaggtggtgaaacgtcttccaaaaaccaggtctgggaaggtcatgcggcggctcctgaggaagatcatcactagtgaggcccaggagctgggagacactaccaccttggaggaccccagcatcatcgcagagatcctgagtgtctaccagaagtgcaaggacaagcaggctgctgctaagtgagctggcaccttgtggggctcttgggatgggcgggcacccaagccctggcttgtccttcccagaaggtacccctgaggttggcgtcttcctacgtcccagaagcagcccccaccccacacatgacccacaccgccctcacgtgaagctgggctgagagccctttctcccatccattggaggtcccaggagtgtcacccatggagaggctatgcgacatggctagggctggttctgccatctgagtttggtttcctggaatgaaaaggcattgccatctccattcctctgccctcttgagccagcacaggaaggtgaggccctgggatagcgcgcctgctcagataacacagagctagttagctagtagcaaccgtgttttctccagatctgtctagatacaaaggtcagaaatcttatttttatacttttatattgtggaagaacagcatgcaacactcacatgtagtgtgtggatttacttgaacatgttctttttaacatgtagttatgaaaatctccttttttgcctctactggtgaggaaacatgaggatcagaggccacatttttaattattgttagtgtatttggaagtctgaattggagatgtttgtacctctgtctaaacagttcccttgagaacttccaagcctccggcatcttttcctggtgagtgtttctcctgtgcttggttgtgtataatggagctaactcctaagcggtggggtgaatgtggccgccttagttctgaagctactccagttatgttctgtttcttcaagctgtgatccagaaagatttttgtgcccccagatgcctcttgataggagaggcaacatactccaaatagttgggttcttcagggaagctattagaaactcaggtgacttgttagagcactaacttggtcagagccaaatcctggcaaacgctgcctgaccttcactctgtggttggggcagtgagaaccactgaggtccaatgatgagacttggaggtctggatccagtctctctttgttttaatgtgacttaggtgctgtcaacattagcaagataatggaaatcacgacgccagtgggtgcttacctccctgctaggcatgcaggggctggcggttggcaggggaaggaggcccagtgagccgggtcccttaggggagggagagtttgtcctctttgccccacagtctacccttcagggccttgtggcagtgccagtgttcggggggtgtctgggccactgagtacccactcggtcgtggttgtgctggcctcttgggtgagtgaacctgtgaagcccaggaggtggtgttggctgcagggtacacaaatactgagtggtggtcttttgttacaggcttagcaacaaagctgtgccctgggcatggggggctgtagtgtagctacagttgtgcgtttgtgaaatggcttagctttccatgttgctgagaggaacctggacatggtcccgggcatctgaatgatctgtaggggagggagttcaaataaagctttattttgttcattttctctttgtggtgatttttttgggtccagtaatgctactctttttttttcctgaatataatcctacagacaaaattggaaggggccttttctcctggggggttcacactcacagccctgactgctccttggtgagctcacctgccttaccaaggatggctgactgcgctgatgcatcagccacacgtggccacttaactgtaacttaaacagaatagaaatttggttcccagtctgcagttgctgcatttcaagtgcccagaggccatgcacagcaggtcagataggcgcactaccaccatcacttggaggccgcaggcggcactgggctagagcacaggcaagagcgagggacaacctggctctgagtagcgtgcatgaggagcatggcctggtccctgggtcatccctccgctagggtgggctggtccttcatcaggacacactgaatcagtgccacagaggcagaatctcagcagtctgggtctgctcctgacacccatctgccagcccctcgatcttatacttcctggcctccatagaaacagatttctgtggtttaagccacccagcctatgatatttagttacagcagcaaatgaatacaaacgaatacaactttcctacttcatattgtacagaggttgtgacaaaaaagaaagggattctggaccatgctgcatgatgccctaccagcagagttcccagggcaagccgcctctctcaaactgcagatttgggaagaaaagcaaagatgctgtgaaatactgccagccagctacttgcttactttgatgctgacctgtggttactctgtggggtgctcaccaatgttcccttggttactacagaaataattaacaaacagagctgctccagggcttctggccaagggttcctccttctccagcttctaggatcctgttctatgtttgtttggcatcgctgcaatacccctctgctattccacaaagaaatttttgcagagcaaacagactggctatccaacctgctcccagatatcctgtgccagggccaggtctgcagaggtacctgctcttttgggggtacagttctggcttttctacttgacattatgacttctttgcatcatggattgtttggaaaaatatttctaattttttttttttttttgagatggagtcttgctctgtcacccagtttggagtgtagtggcaccatctcggctcactacaacctccacctccccaggtcaagcaattctcctgcctcagcctcccgagtagctgggactacaggtgcacgccaccacacctggctaatttttgtatttttagtagagacgaggttttaacatgttggccaggctggtctcaaactcctgaccttaggtgatacacccgccttggcctcccaaagtgttgggattacaggtgtgagccaccgcgcctggcctatttctaaaatttctaaacatttagtttttgttattttatagtttttgttattggtgtttagcttatttgcactgtgatcagagagcatgctctcccatgacttctgtgctctgaagtttgttgaggcctgctgcatgcctcaacctatcgccaatttttagaaaggtcccattcgagatggaaaagaagtattctgtaatcattgggtagaagattgtatacgtatccactgggtcaagttgctgatcatgttgttcaaatccatgtcccatctcacttttactcagttgtttcatcacttactgagacagacttgttaaaagttcccacttccactgtgagtttctctagttctgtcagtttttgctttggacattttgaagctttatctatttgcatatttatctagcacaattatttatgtatttatctatttgttgtgtattaggtgctatttaaaattgttataacttcctgatgaattgactctaaaagaggcatccccctttagtctctaaatgtgctttcttttggctgtaaaatatatttcttctgatattagtatagtcacatcagctttctttttgttaatatttgcatggaatagtttttccatccctttaattttcttttctttctttttttttgagacatggtcttgttgtgttccccaggctggtctcgaactcctgggctcaagcaatcctcctaccccagcctcccaagtagctgggaccacaggagaaaaccatggtgtccagtggatcattcctttaactttaatcttattatagccttatgtttttgatgtatctcttttaaatagcatgtagcttcaccttggttttttaaatcactctggaaatctttgccatttaaatgatacatttaatctacttacatttaacgtaactagttatatatttgggtttaaatccaccatctaactcagtactttttatttgccctgtttgttctatgttctctttttttttccttcctttagagtgaccattttttattattctaatttttgccctctccccattagcttgaagttataaactcttaccattttaattgttaccctagattataagttgcagccttcaatattaattggtaccttaccctatttccagtcaatacaaagactttaagaacacactttaacaacatataaacctctcttccaacttataaatcatgcattttagttttctctctattttaattctacaaggtagtattattatagttgtatgcatcttattattgttctatatagacaatattaacttagatttacccatatatttatcattttttggtatctcttctatacctccaaacttccatttggaataatttaccttctgcctgaaaggacttttgtcatttcttttaataaaggtctgctgataagaaattcattcagtttttgtctacttggaagtatttatttcatgatcactcttaaaggatattttgactgggtgtataactctagcctgttaattatttttttcagcactacaacgatctcatttccattggtatctgttttcccatgtttctgttgagtagttggctgtcaaactaacaaatggtcatttaaagttaatctaccacttttcctttggctgctcttgatatttctccttgtctttggtttttgcagttttattttttgttgacttttttttttaatcttgcttgggttctgcaggacttcttagatctgtattgatgtctgtatcattttggaaatatctcaaccattatctctttaaatatcatttttgcctattctctcttcttttgttgaggaccccaacttcccatatgatgaaatttctcacaattctaatttctgtatctcttgctgccttagcctgggttgcctggaaagcagagcctgatataaaggcttgcatgcaggtacattacttacggatgtgattctaggaacaaatgtgaggaatgaggggtatggaacagggaaggagcaagaaccaatacaagtatttgactgagtcagctggtgtgacagacaactcgggctgcatctcaggactcaggaggaatcttataaaatatgtccctgaactcactcattcacaaagagctgttagaaatacagcttggcacaaagctggaggcatcacgctacctgacttcaaactatactacaaggctacagtaaccaaaacagcatagtactggtaccaaaacagagatatagaccaatggaacagaacagagccctcagaaataataccacacatctacaattatctgatctttgacaaacctggcaaaaacaagaaatggggaaaggagtccctatttaataaatggtgctgggaaaactggctagccatatgtagaaagctgaaactggatcccttccttacaccttatacaaaaattaattcaagatggattaaagacttaaatgttagacctaaaaccataataaccctagaagaaaacccaggcaataccattcagcccataggcatgtgcaaagacttcatgactaaaacaccaaaagcaatggcaacaaaagccaaaattgacaaatgggatctaattaaactaaagagcttctgcacagcaaaagaaactaccatcagagtgaacaggcaacctacagaatgggagaaaatttttacaatctacccatctgacaaagggctaatatccagaatctacaaagaatttaaacaaatttacaagaaaaaaaatcaaacaaccccaacaacaagtgggtgaaggatatgaacagacacttctcaaaagaagatatttatgcagccaacagacgcgtgaacaaatgcttatcatcactggtcatcagagaaatgcaaatcaaaaccacaatgagatatcaactcacaccagttagaatggcgatcattaaaaagtcaggaaaaaacagatgctggagaggatgtggagaaataggaacacttttacactgttggttggactgtaaactagttcaaccattgtggaagtcagtgtggtgattcctcaaggatctagaactagaaatactatttgacccagacatctgattactgggcatatacccaaaggattataaataatgctgctataaagacccatgcacacgtatgtttattgtggcactattcacaatagcaaagacttggaaccaacccaaatgtccatcaatgatagactcgattaagaaaatgtggcacatatacaccttggaatactatgcagccataaaaaaggatgagttcatgtcctttgtagggacatgcatgaaactggaaaccatcattctgagcaaactatcgcaaggacagaaaaccaaagaccgcatgttctcactcataggtgggaattgaacaatgagaacacttggacacagggtggggaacatcacacactggggcttgttgtggggtggggggagggatagcattaggagatatacctaatgtaaacgacaagttaaggggtacagcacaccaacatggcacatgtatacatatgtaacaaacctgcacattgtgcacatgtaccctagaacttaaagtataataaaaaaaaaaagaagaaaaggaaaaaaaagaaatatggcttggcatctcaactttctcctgtggaggctgcatacacacccaggggaaaaatggctacaaggccaggtgcggtggctcatacctgtaattccagcactttgggaggccaaggcaggaggactggttgagctcaggagttcgagaccagcctgggcaacatagacctctactaaacatctctactaaaattaaaaaaaaaattagctgggcatggtggcacatgcctgcagtcccagctactcagagggctgaggcagaaggatcatctgaacctgggaggctgaggctgcagtgagccctgattgtgccactgcactccagcctgggcaacagagcaagaccttgtgtaaaaaaacaaaagtggttacacaccaggctcatcatcctgggtctctgttgttcccagatcctggtccagcaattccacaccagtttcaggctctccgatttcttcaagcaaatgctttaaatattttgttcattgttgtcccctttgggagtgtgagtctatctaattagtcatcatctaaatggaaaatattgcataatgttccactgatgtttagcagcatctctggccttccccccacagatgccagtagcatcctacctagtcatgatcataaaaattgttgccagacattgacaaatgtcccctggtggacaaaatggcccttggttgggaagcgctgggttagaccaaccggaacccacctctaaccctggcactcacttccattagaacactggcccacgtggaggacgtttatctcaacaaaaacaggttctgccagcatgtcagaagaggcacatgatgctggcaggcagcccacagtgtgcctcacagctcaaaccagaagcaaaccctacttctagtccagtgctttttcccagtcccatgctgtttcaactccttccactctcaggaggctggggtcttcaaatctgtaaattctaacaactccccaggtgttttgcacagtcagccaggccctggtccagtcaaccagtgtttggagatcactgactaagcctaagttttatttcaacttaagatagggacctggatagagagaactttcaagctaggcaacaggtgtttttgtttttgttttattttttagacttttggggaggggatgggatataacaaacttatacagaaaagtgtacaagtgtacaaacttacatagaaaagtgtacataaatatgcagctaaacaagctgatataaaacaaaacccaggtaaccccctccaaggtcatgatacaaaacatcagcatttcagatgccacccccacccattcctgatcataatctgtgtcccatggctaaatcacagccttgcagagtcccagcccagcagaggagaggggtgtttcgtcagcgtctcacctgcatccctgcagcccctcccagcccagagctgcctctcaggtgtcttctgcaggcgggcagtccctcaggtcaccagtacaaattggtggtggcagtgattctccaaggtctccagtctcagagacactggactcaggttccccaaattggaatgctctacgtatttctctatttcctatttgcttttaaagtgctaatctgttgcaaatttagtttttaaaagtattttaaaactcccaatgcacaagcagtaccccagaccagtgataccagaatttctggggtgtcacgtaggcatctttccagatgattccaacatgcagccaaagttgagagccactgtcttaaagttcagcccctctggggtgacactataaagcacagccacaattcatgatgcccggttgaagcctttgcctctgctgcctggcatacgcagctccttttcccttccatggaatgcctctgagtccagttgctgccattgtgaaggtacccacactctcattatggagcccaacactgtcatggcctcctggcacagggcactcggaggaaggaaactggagaagcaggacctgagccatgggaagggaaggagaaggtgttcatctccttagggttgcctctctggtgtgtgcatgtaaacaaagagtggagcgagaaacttggcccctgagaaaacgcaaatgctttaagtcagttactgagttcaggagaccttcctcctgtgagttcataaatgatttgcttccctataaagacttaggagctctgtgacacttactgaagtgaaagcgagagtgttcagagcttgcgtctgcagtcacatactgataaacacggcgaataacaccaatccaaatccccagtgcctatagcagtgcccagcatgtgaaagtgcccagtggtatctgtagaatgaagagtgaacagacgtcacactgacctagctgatgtgtgggaaggacagagctttggcctggtggagaaaggcagggaatggaggcgctggctcaggctctggagttctgcagtggagggaggggaataaactgctatgaaggcacagggcagacctatgaagaaggcaagaactatgtgggacacgaaaatcctcctgcctgctgccttggctcacaagcatcagagtgaggaaatgagggtgtcctcacccaccctgctctctggagggcagaaagggaagaaacagagaagataggctcagtttatccgtctgggggagaagagtcatgcttttgttcagttgtccagctgctgcttctccttctattaaggccatgggagagtggaggtctccctgtcaacttgctccctatcagccatcctacaggaatgccattaccccccaaacttgccacttgtgggtgcctgagtttgcactttgttctgttccagtggctgttgctaatcgtgaaactgaggctcccacctgtgccagtctttattccagatacaagaaaagttgttggttagtgcccatggaactggaccacagggagccacccctggctatggaggtgacaagctagagggcaagaagcctatcctaaacaaacccagaactagtagatggaagggagctgggtgttccataccctaggacgttaccagtacgcacctgagtttggaaaccttttgagataactaacattgccaacttcttttgcaacagggtggaacttctctggcaagagccatcagttggttaatcttgggttttctagtctctctgttcctgtagatccaaacttttgccacacagccttctgcatgaacaaacacattgggccaattccttcctaaagaaggacattacctcacccaaacaacacatctcttcattactgagagccaaagaaacattgaactcttacaaatatgcataagttttttcaacagaaaaaaaagcaggacaggaatcatcaaaatggaaatgattacagttgacccttgaacaaagtggaggttgggggtgccaacccccagtccagctgaaaatccacatataacatttgactcccccaaaacttaactatgaatagcctactgttggccggaagccttactgatagctgtaaacattgaattaacacatattttgtatgtcctaagtattatatactgtattcttacagtaaactaagctagagaaaagaaaatgccattaaaaatcataaggaagagaaaatatttttactattcatgaaggtgaagtggatcatcatgacggtcttcatcttcattgtcttcacattgagtaggctgggaggaggagggaggggaggggttgttgctgtctcaggggtggcagaggcagaagaggtggagcaggtggaaggggaggctggtgtaacttttattgaaaaaacattctcccatgagtgcacctgtgtagttcaaacccatgttgttcaagggtcaagtgtagttactctcaagagatggtttctggatgtaataaaacatgattaatgagtgatctgtgctaatcatgaaatgtcagtgttaagattccaaagggaacaaaggggctggccattcacttttcaacaacagacaatcaggaatgtacatgcctgtggtggaggtgactgctgaacgtctttcctcctgagcacttttcctgccaagtctaggtcgaccttaagaatcctccacgtgggcaattagggcaattttcctggccagactctcttcagtgctcacctctgctcctccctgcttctcatggggtgaccacgcattcagtgagcctgtcctgcccttctgcctacaacagggaggctgctgtgttgttcccgttgaatggtcaatgggccacggggtcttatcctctaacatggatcatcaacctcaccaaagttgggaacatcagattctcagtccaggaatcaagacttggagacggagaccatagttagttggtgtgggatacttgaaatgggagagccagggagagttgggcttaggcgatgctttttcaccatggatatgtccaggtagacaatgctagcctgttggccctgaggagcagtgcaaattgctcccctgagagctgcctcaatgcataaaaggactgtttctctcatgtgataggcagccctgaggtaggtggttgctggctgtggtgaacagctcaggggcaccattaaggacctaggctcttctgttctgggtgtgttttttagacatcaaggtgtattcctgtggtgttaagatgctgctgctccatgcttaactctcgggttccaggcaggagaagaaggggcagtgctagtcccatttgtcccttttatcagaaatgcaaaaactttcctaaagttcaaaatagtcactatatttctgtttttatcttgtgccaaaatactgcctatggctgcattagctttgacagctggatgagtaacactgatcttttccagctctccaggggagggcaacaaaagagaaagggccagcccagcagggcgtgccatgtgagcacggaggggtgcagagacaggacagtgtgagg

SEQ ID NO: 1506 - DNA, 3419 bp, Homo sapiens
ccccaaaaggaaaacgaggcaccgagaagttaaggaacttgctcaaggtcacagagtttgaactcaggctacagatgctgcagcaactggagaaagtcctcatcgccccatatcacccaccaccgacccccagcaggacgtgacccccgccaggacggaggccggcagctggggggctggagcatgggacccagaacacggactcaggcttgcgcagcctcctggcttctaggcgggagcctagaaaggcgccagcccctttcgcgtgctgctgagactccaggggtggggttcactctcaggggcgcacaaaggcatgaaaaccttggcttcagcctctgagatgcggaactgaccgacctattgtcttgggacccaccagtgcgcttgggtgcaccagcccccttaacgttggtgccggctccctcccggctcctccccatcccagagggtcccctcgccccaggccctgagcctgcgtcctggggtcctgggccgcacgtgcctctggcagctcgaagaagctgtcggggcttgcaggagagcgtgcaaactgaaaccaaaacaggccgactcgaggaacatccgggtgggaccgcagactcaccggagcgcagcgcctgggccagggcctgggaccctgctccgccccgcgctcccctgcaccccttccccacgctgctcccctcttcctaagcggccccccctctcccgggcagcagaagaaggggtgggacccgggcgggctccgggagggggccctggaggaatggatggtggcggaagggcggagcaggggcggggcccgcggagactccacggggcgccccgggcgtgaggcacccactctgggagcacagagagctcaggtagcctgcctagatggcggcgcgcaccctgggccgcggcgtcgggaggctgctgggcagcctgcgagggctctcggggcagcccgcgcggccgccgtgcggggtgagcgcgccgcgcagggcggcctcgggaccctcgggcagcgctcccgcagttgcagcagcagcagcacagccaggctcgtatcccgcgctgagtgcacaggcagcccgggagccggccgccttctgggggcctctggcgcgggacactctcgtgtgggacaccccctaccacaccgtctgggactgcgacttcagcactggcaagatcggctggttcctgggaggccagttaaatgtctctgtcaactgcttggaccagcatgttcggaagtcccccgagagcgttgctttgatctgggagcgcgatgagcctggaacggaagtgaggatcacctacagggaactactggagaccacgtgccgcctggccaacacgctgaagaggcatggagtccaccgtggggaccgtgttgccatctacatgcccgtgtccccattggctgtggcagcaatgctggcctgtgccaggatcggagctgtccacacagtcatctttgctggcttcagtgcagagtccttggctgggaggatcaatgatgccaagtgcaaggtggttatcaccttcaaccaaggactccggggtgggcgcgtggtggagctgaagaaaatagtggatgaggctgtgaagcactgccccaccgtgcagcatgtcctggtggctcacaggacagacaacaaggtccacatgggggatctggacgtcccgctggagcaggaaatggccaaggaggaccctgtttgcgccccagagagcatgggcagtgaggacatgctcttcatgctgtacacctcagggagcaccggaatgcccaagggcatcgtccatacccaggcaggctacctgctctatgccgccctgactcacaagcttgtgtttgaccaccagccaggtgacatctttggctgtgtggccgacatcggttggattacaggacacagctacgtggtgtatgggcctctctgcaatggtgccaccagcgtcctttttgagagcaccccagtttatcccaatgctggtcggtactgggagacagtagagaggttgaagatcaatcagttctatggcgccccaacggctgtccggctgttgctgaaatacggtgatgcctgggtgaagaagtatgatcgctcctccctgcggaccctggggtcagtgggagagcccatcaactgtgaggcctgggagtggcttcacagggtggtgggggacagcaggtgcacgctggtggacacctggtggcagacagaaacaggtggcatctgcatcgcaccacggccctcggaagaaggggcggaaatcctccctgccatggcgatgaggcccttctttggcatcgtccccgtcctcatggatgagaagggcagcgtcgtggagggcagcaacgtctccggggccctgtgcatctcccaggcctggccgggcatggccaggaccatctatggcgaccaccagcgatttgtggacgcctacttcaaggcctacccaggctattacttcactggagacggggcttaccgaactgagggcggctattaccagatcacagggcggatggatgatgtcatcaacatcagtggccaccggctggggaccgcagagattgaggacgccatcgccgaccaccctgcagtaccagaaagtgctgtcattggctacccccacgacatcaaaggagaagctgcctttgccttcattgtggtgaaagatagtgcgggtgactcagatgtggtggtgcaggagctcaagtccatggtggccaccaagatcgccaaatatgctgtgcctgatgagatcctggtggtgaaacgtcttccaaaaaccaggtctgggaaggtcatgcggcggctcctgaggaagatcatcactagtgaggcccaggagctgggagacactaccaccttggaggaccccagcatcatcgcagagatcctgagtgtctaccagaagtgcaaggacaagcaggctgctgctaagtgagctggcaccttgtggggctcttgggatgggcgggcacccaagccctggcttgtccttcccagaaggtacccctgaggttggcgtcttcctacgtcccagaagcagcccccaccccacacatgacccacacctctacccttcagggccttgtggcagtgccagtgttcggggggtgtctgggccactgagtacccactcggtcgtggttgtgctggcctcttgggtgagtgaacctgtgaagcccaggaggtggtgttggctgcagggtacacaaatactgagtggtggtcttttgttacaggcttagcaacaaagctgtgccctgggcatggggggctgtagtgtagctacagttgtgcgtttgtgaaatggcttagctttccatgttgctgagaggaacctggacatggtcccgggcatctgaatgatctgtaggggagggagttcaaataaagctttattttgtt

SEQ ID NO: 1507 - protein, 685 aa, Homo sapiens
MAARTLGRGVGRLLGSLRGLSGQPARPPCGVSAPRRAASGPSGSAPAVAAAAAQPGSYPALSAQAAREPAAFWGPLARDTLVWDTPYHTVWDCDFSTGKIGWFLGGQLNVSVNCLDQHVRKSPESVIWERDEPGTEVRIYELLETTCRLANTLKRHGVHRGDRVAIYMPVSPLAVAAMLACARIGAVHTVIFAGFSAESLAGRINDAKCKVVITFNQGLRGGRVVELKKIVDEAVKHCPTVQHVLVAHRTDNKVHMGDLDVPLEQEMAKEDPVCAPESMGSEDMLFMLYTSGSTGMPKGIVHTQAGYLLYAALTHKLVFDHQPGDIFGCVADIGWITGHSYVVYGPLCNGATSVLFESTPVYPNAGRYWETVERLKINQFYGAPTAVRLLLKYGDAWVKKYDRSSLRTLGSVGEPINCEAWEWLHRVVGDSRCTLVDTWWQTETGGICIAPRPSEEGAEILPAMAMRPFFGIVPVLMDEKGSVVEGSNVSGALCISQAWPGMARTIYGDHQRFVDAYFKAYPGYYFTGDGAYRTEGGYYQITGRMDDVINISGHRLGTAEIEDAIADHPAVPESAVIGYPHDIKGEAAFAFIVVKDSAGDSDVVVQELKSMVATKIAKYAVPDEILVVKRLPKTRSGKVMRRLLRKIITSEAQELGDTTTLEDPSIIAEILSVYQKCKDKQAAAK

SEQ ID NO: 1508 - DNA, 4688 bp, Homo sapiens
tccccaaaaggaaaacgaggcaccgagaagttaaggaacttgctcaaggtcacagagtttgaactcaggctacagatgctgcagcaactggagaaagtcctcatcgccccatatcacccaccaccgacccccagcaggacgtgacccccgccaggacggaggccggcagctggggggctggagcatgggacccagaacacggactcaggcttgcgcagcctcctggcttctaggcgggagcctagaaaggcgccagcccctttcgcgtgctgctgagactccaggggtggggttcactctcaggggcgcacaaaggcatgaaaaccttggcttcagcctctgagatgcggaactgaccgacctattgtcttgggacccaccagtgcgcttgggtgcaccagcccccttaacgttggtgccggctccctcccggctcctccccatcccagagggtcccctcgccccaggccctgagcctgcgtcctggggtcctgggccgcacgtgcctctggcagctcgaagaagctgtcggggcttgcaggagagcgtgcaaactgaaaccaaaacaggccgactcgaggaacatccgggtgggaccgcagactcaccggagcgcagcgcctgggccagggcctgggaccctgctccgccccgcgctcccctgcaccccttccccacgctgctcccctcttcctaagcggccccccctctcccgggcagcagaagaaggggtgggacccgggcgggctccgggagggggccctggaggaatggatggtggcggaagggcggagcaggggcggggcccgcggagactccacggggcgccccgggcgtgaggcacccactctgggagcacagagagctcaggtagcctgcctagatggcggcgcgcaccctgggccgcggcgtcgggaggctgctgggcagcctgcgagggctctcggggcagcccgcgcggccgccgtgcggggtgagcgcgccgcgcagggcggcctcgggaccctcgggcagcgctcccgcagttgcagcagcagcagcacagccaggctcgtatcccgcgctgagtgcacaggcagcccgggagccggccgccttctgggggcctctggcgcgggacactctcgtgtgggacaccccctaccacaccgtctgggactgcgacttcagcactggcaagatcggctggttcctgggaggccagttaaatgtctctgagttgcgttaccgggtgcatagcgccgctgagcaagagccggcggggagccgcgggctacacccgagcgccccggagtcgggactttcccgttcccataccggggtggagggaaaaacaaagcggtggcggttgtcactgcgggctgcggtgcccggggatcagcctggggacaagccctgcccactcaactgcttggaccagcatgttcggaagtcccccgagagcgttgctttgatctgggagcgcgatgagcctggaacggaagtgaggatcacctacaggtactgtgccctcgaatgttcaagggaactactggagaccacgtgccgcctggccaacacgctgaagaggcatggagtccaccgtggggaccgtgttgccatctacatgcccgtgtccccattggctgtggcagcaatgctggcctgtgccaggatcggagctgtccacacagtcatctttgctggcttcagtgcagagtccttggctgggaggatcaatgatgccaagtgcaaggtggttatcaccttcaaccaaggactccggggtgggcgcgtggtggagctgaagaaaatagtggatgaggctgtgaagcactgccccaccgtgcagcatgtcctggtggctcacaggacagacaacaaggtccacatgggggatctggacgtcccgctggagcaggaaatggccaaggaggaccctgtttgcgccccagagagcatgggcagtgaggacatgctcttcatgctgtacacctcagggagcaccggaatgcccaagggcatcgtccatacccaggcaggctacctgctctatgccgccctgactcacaagcttgtgtttgaccaccagccaggtgacatctttggctgtgtggccgacatcggttggattacaggacacagctacgtggtgtatgggcctctctgcaatggtgccaccagcgtcctttttgagagcaccccagtttatcccaatgctggtcggtactgggagacagtagagaggttgaagatcaatcagttctatggcgccccaacggctgtccggctgttgctgaaatacggtgatgcctgggtgaagaagtatgatcgctcctccctgcggaccctggggtcagtgggagagcccatcaactgtgaggcctgggagtggcttcacagggtggtgggggacagcaggtgcacgctggtggacacctggtggcagacagaaacaggtggcatctgcatcgcaccacggccctcggaagaaggggcggaaatcctccctgccatggcgatgaggcccttctttggcatcgtccccgtcctcatggatgagaagggcagcgtcgtggagggcagcaacgtctccggggccctgtgcatctcccaggcctggccgggcatggccaggaccatctatggcgaccaccagcgatttgtggacgcctacttcaaggcctacccaggctattacttcactggagacggggcttaccgaactgagggcggctattaccagatcacagggcggatggatgatgtcatcaacatcagtggccaccggctggggaccgcagagattgaggacgccatcgccgaccaccctgcagtaccagaaagtgctgtcattggctacccccacgacatcaaaggagaagctgcctttgccttcattgtggtgaaagatagtgcgggtgactcagatgtggtggtgcaggagctcaagtccatggtggccaccaagatcgccaaatatgctgtgcctgatgagatcctggtggtgaaacgtcttccaaaaaccaggtctgggaaggtcatgcggcggctcctgaggaagatcatcactagtgaggcccaggagctgggagacactaccaccttggaggaccccagcatcatcgcagagatcctgagtgtctaccagaagtgcaaggacaagcaggctgctgctaagtgagctggcaccttgtggggctcttgggatgggcgggcacccaagccctggcttgtccttcccagaaggtacccctgaggttggcgtcttcctacgtcccagaagcagcccccaccccacacatgacccacaccgccctcacgtgaagctgggctgagagccctttctcccatccattggaggtcccaggagtgtcacccatggagaggctatgcgacatggctagggctggttctgccatctgagtttggtttcctggaatgaaaaggcattgccatctccattcctctgccctcttgagccagcacaggaaggtgaggccctgggatagcgcgcctgctcagataacacagagctagttagctagtagcaaccgtgttttctccagatctgtctagatacaaaggtcagaaatcttatttttatacttttatattgtggaagaacagcatgcaacactcacatgtagtgtgtggatttacttgaacatgttctttttaacatgtagttatgaaaatctccttttttgcctctactggtgaggaaacatgaggatcagaggccacatttttaattattgttagtgtatttggaagtctgaattggagatgtttgtacctctgtctaaacagttcccttgagaacttccaagcctccggcatcttttcctggtgagtgtttctcctgtgcttggttgtgtataatggagctaactcctaagcggtggggtgaatgtggccgccttagttctgaagctactccagttatgttctgtttcttcaagctgtgatccagaaagatttttgtgcccccagatgcctcttgataggagaggcaacatactccaaatagttgggttcttcagggaagctattagaaactcaggtgacttgttagagcactaacttggtcagagccaaatcctggcaaacgctgcctgaccttcactctgtggttggggcagtgagaaccactgaggtccaatgatgagacttggaggtctggatccagtctctctttgttttaatgtgacttaggtgctgtcaacattagcaagataatggaaatcacgacgccagtgggtgcttacctccctgctaggcatgcaggggctggcggttggcaggggaaggaggcccagtgagccgggtcccttaggggagggagagtttgtcctctttgccccacagtctacccttcagggccttgtggcagtgccagtgttcggggggtgtctgggccactgagtacccactcggtcgtggttgtgctggcctcttgggtgagtgaacctgtgaagcccaggaggtggtgttggctgcagggtacacaaatactgagtggtggtcttttgttacaggcttagcaacaaagctgtgccctgggcatggggggctgtagtgtagctacagttgtgcgtttgtgaaatggcttagctttccatgttgctgagaggaacctggacatggtcccgggcatctgaatgatctgtaggggagggagttcaaataaagctttattttgttca

SEQ ID NO: 1509 - protein, 755 aa, Homo sapiens
MAARTLGRGVGRLLGSLRGLSGQPARPPCGVSAPRRAASGPSGSAPAVAAAAAQPGSYPALSAQAAREPAAFWGPLARDTLVWDTPYHTVWDCDFSTGKIGWFLGGQLNVSELRYRVHSAAEQEPAGSRGLHPSAPESGLSRSHTGVEGKTKRWRLSLRAAVPGDQPGDKPCPLNCLDQHVRKSPESVIWERDEPGTEVRIYYCALECSRELLETTCRLANTLKRHGVHRGDRVAIYMPVSPLAVAAMLACARIGAVHTVIFAGFSAESLAGRINDAKCKVVITFNQGLRGGRVVELKKIVDEAVKHCPTVQHVLVAHRTDNKVHMGDLDVPLEQEMAKEDPVCAPESMGSEDMLFMLYTSGSTGMPKGIVHTQAGYLLYAALTHKLVFDHQPGDIFGCVADIGWITGHSYVVYGPLCNGATSVLFESTPVYPNAGRYWETVERLKINQFYGAPTAVRLLLKYGDAWVKKYDRSSLRTLGSVGEPINCEAWEWLHRVVGDSRCTLVDTWWQTETGGICIAPRPSEEGAEILPAMAMRPFFGIVPVLMDEKGSVVEGSNVSGALCISQAWPGMARTIYGDHQRFVDAYFKAYPGYYFTGDGAYRTEGGYYQITGRMDDVINISGHRLGTAEIEDAIADHPAVPESAVIGYPHDIKGEAAFAFIVVKDSAGDSDVVVQELKSMVATKIAKYAVPDEILVVKRLPKTRSGKVMRRLLRKIITSEAQELGDTTTLEDPSIIAEILSVYQKCKDKQAAAK

SEQ ID NO: 1510 - DNA, 3540 bp, Homo sapiens
tgcaccagcccccttaacgttggtgccggctccctcccggctcctccccatcccagagggtcccctcgccccaggccctgagcctgcgtcctggggtcctgggccgcacgtgcctctggcagctcgaagaagctgtcggggcttgcaggagagcgtgcaaactgaaaccaaaacaggccgactcgaggaacatccgggtgggaccgcagactcaccggagcgcagcgcctgggccagggcctgggaccctgctccgccccgcgctcccctgcaccccttccccacgctgctcccctcttcctaagcggccccccctctcccgggcagcagaagaaggggtgggacccgggcgggctccgggagggggccctggaggaatggatggtggcggaagggcggagcaggggcggggcccgcggagactccacggggcgccccgggcgtgaggcacccactctgggagcacagagagctcaggtagcctgcctagatggcggcgcgcaccctgggccgcggcgtcgggaggctgctgggcagcctgcgagggctctcggggcagcccgcgcggccgccgtgcggggtgagcgcgccgcgcagggcggcctcgggaccctcgggcagcgctcccgcagttgcagcagcagcagcacagccaggctcgtatcccgcgctgagtgcacaggcagcccgggagccggccgccttctgggggcctctggcgcgggacactctcgtgtgggacaccccctaccacaccgtctgggactgcgacttcagcactggcaagatcggctggttcctgggaggccagttaaatgtctctggtgagtgggcttcgggagacccaggacgcccccaactcttgggtcccgaggggactcggagcctctcgccagcggcagccgtccccgggcagcgcggatcgcagccctgcaggggcccctcctccggtattccgtccgccccgcccgctctaagcagtggctccacgtcaccccgtccctcatcccatcgggccccagatccacgtgcccagctcgggccggcgcccgcggggacccggcggccgcttgggacgccccgctgctggccttgctcggcgcggctcctcgctcggcggactccagagttgcgttaccgggtgcatagcgccgctgagcaagagccggcggggagccgcgggctacacccgagcgccccggagtcgggactttcccgttcccataccggggtggagggaaaaacaaagcggtggcggttgtcactgcgggctgcggtgcccggggatcagcctggggacaagccctgcccactcaactgcttggaccagcatgttcggaagtcccccgagagcgttgctttgatctgggagcgcgatgagcctggaacggaagtgaggatcacctacaggtactgtgccctcgaatgttcaagggaactactggagaccacgtgccgcctggccaacacgctgaagaggcatggagtccaccgtggggaccgtgttgccatctacatgcccgtgtccccattggctgtggcagcaatgctggcctgtgccaggatcggagctgtccacacagtcatctttgctggcttcagtgcagagtccttggctgggaggatcaatgatgccaagtgcaaggtggttatcaccttcaaccaaggactccggggtgggcgcgtggtggagctgaagaaaatagtggatgaggctgtgaagcactgccccaccgtgcagcatgtcctggtggctcacaggacagacaacaaggtccacatgggggatctggacgtcccgctggagcaggaaatggccaaggaggaccctgtttgcgccccagagagcatgggcagtgaggacatgctcttcatgctgtacacctcagggagcaccggaatgcccaagggcatcgtccatacccaggcaggctacctgctctatgccgccctgactcacaagcttgtgtttgaccaccagccaggtgacatctttggctgtgtggccgacatcggttggattacaggacacagctacgtggtgtatgggcctctctgcaatggtgccaccagcgtcctttttgagagcaccccagtttatcccaatgctggtcggtactgggagacagtagagaggttgaagatcaatcagttctatggcgccccaacggctgtccggctgttgctgaaatacggtgatgcctgggtgaagaagtatgatcgctcctccctgcggaccctggggtcagtgggagagcccatcaactgtgaggcctgggagtggcttcacagggtggtgggggacagcaggtgcacgctggtggacacctggtggcagacagaaacaggtggcatctgcatcgcaccacggccctcggaagaaggggcggaaatcctccctgccatggcgatgaggcccttctttggcatcgtccccgtcctcatggatgagaagggcagcgtcgtggagggcagcaacgtctccggggccctgtgcatctcccaggcctggccgggcatggccaggaccatctatggcgaccaccagcgatttgtggacgcctacttcaaggcctacccaggctattacttcactggagacggggcttaccgaactgagggcggctattaccagatcacagggcggatggatgatgtcatcaacatcagtggccaccggctggggaccgcagagattgaggacgccatcgccgaccaccctgcagtaccagaaagtgctgtcattggctacccccacgacatcaaaggagaagctgcctttgccttcattgtggtgaaagatagtgcgggtgactcagatgtggtggtgcaggagctcaagtccatggtggccaccaagatcgccaaatatgctgtgcctgatgagatcctggtggtgaaacgtcttccaaaaaccaggtctgggaaggtcatgcggcggctcctgaggaagatcatcactagtgaggcccaggagctgggagacactaccaccttggaggaccccagcatcatcgcagagatcctgagtgtctaccagaagtgcaaggacaagcaggctgctgctaagtgagctggcaccttgtggggctcttgggatgggcgggcacccaagccctggcttgtccttcccagaaggtacccctgaggttggcgtcttcctacgtcccagaagcagcccccaccccacacatgacccacacctctacccttcagggccttgtggcagtgccagtgttcggggggtgtctgggccactgagtacccactcggtcgtggttgtgctggcctcttgggtgagtgaacctgtgaagcccaggaggtggtgttggctgcagggtacacaaatactgagtggtggtcttttgttacaggcttagcaacaaagctgtgccctgggcatggggggctgtagtgtagctacagttgtgcgtttgtgaaatggcttagctttccatgttgctgagaggaacctggacatggtcccgggcatctgaatgatctgtaggggagggagttcaaataaagctttattttgtt

SEQ ID NO: 1511 - protein, 856 aa, Homo sapiens
MAARTLGRGVGRLLGSLRGLSGQPARPPCGVSAPRRAASGPSGSAPAVAAAAAQPGSYPALSAQAAREPAAFWGPLARDTLVWDTPYHTVWDCDFSTGKIGWFLGGQLNVSGEWASGDPGRPQLLGPEGTRSLSPAAAVPGQRGSQPCRGPSSGIPSAPPALSSGSTSPRPSSHRAPDPRAQLGPAPAGTRRPLGTPRCWPCSARLLARRTPELRYRVHSAAEQEPAGSRGLHPSAPESGLSRSHTGVEGKTKRWRLSLRAAVPGDQPGDKPCPLNCLDQHVRKSPESVIWERDEPGTEVRIYYCALECSRELLETTCRLANTLKRHGVHRGDRVAIYMPVSPLAVAAMLACARIGAVHTVIFAGFSAESLAGRINDAKCKVVITFNQGLRGGRVVELKKIVDEAVKHCPTVQHVLVAHRTDNKVHMGDLDVPLEQEMAKEDPVCAPESMGSEDMLFMLYTSGSTGMPKGIVHTQAGYLLYAALTHKLVFDHQPGDIFGCVADIGWITGHSYVVYGPLCNGATSVLFESTPVYPNAGRYWETVERLKINQFYGAPTAVRLLLKYGDAWVKKYDRSSLRTLGSVGEPINCEAWEWLHRVVGDSRCTLVDTWWQTETGGICIAPRPSEEGAEILPAMAMRPFFGIVPVLMDEKGSVVEGSNVSGALCISQAWPGMARTIYGDHQRFVDAYFKAYPGYYFTGDGAYRTEGGYYQITGRMDDVINISGHRLGTAEIEDAIADHPAVPESAVIGYPHDIKGEAAFAFIVVKDSAGDSDVVVQELKSMVATKIAKYAVPDEILVVKRLPKTRSGKVMRRLLRKIITSEAQELGDTTTLEDPSIIAEILSVYQKCKDKQAAAK

SEQ ID NO: 1512 - DNA, 64677 bp, Mus musculus
  misc_feature (1)...(64677): n = A,T,C or G
cttcaaacccatttgtgtgaaagacagttgatatcgggtccaactaggaactcacaactgcaagtgcagttgtctggagctgccagggtgacacaaggtagaaaagaaaaaccacacggtaaagttgtccaccgtttcatccacaaggccacaagccccgtctagggccatgttaagtgtttcctgttggcctcacgttctcaatgttagctgccacaaatggcagtcagtctgtgtcttagggaggctgctctaagcccccttcttcctctctgcctccccaccctcagtaaaccaaaaggtcctaccctgcccactaagagtctggcttcctggccttgcataggtcatgggcagcagggcagctaaagcccttgacacaagactcctgtctcacgtggtcctctgcagtctctgggtaagagtatctggagagctgaagatgcatttcccaagtcctggctcctctatcttcacagatcccaaatgggagtcctctctgtggcttccagcacaaaggaatccagattctactcgatggggatctcggacaggggccatttccatctcccaatgcacagagtgaagctgggcttggtgacacccacctgtgttcccagcaccaaagaggccaaagcaggaaggatcatcaagagcttgaagtctgccaggcagtggtgatacaccccctttaatcccagcactctggaggcagaggcaggcagatctctgagtttggggccagcctagactacagagtgagttccgggtcagcctggaaaaccctgtctcaaaaaaccaaaccaaaaccaaccaaccaaccaaccaaccaaccaaccaaccaatcaaccaaccaaacaaacaaacaaacaaacaatcaataacaaaataaagagttcaagatcagcctgagctcaggggaagacgccgtctcagaatgaaaggctgagaggatgactctgaagtgctggccatgcaagcatgaagacctgaactcaggcagttggggtggggtggcagggagagaagtccaggctgggtggcatgcttttgtaatcccaaagcaggggggacagagtcaggccaatccctggggcttgctgacctgccaaccctgacaccttggtgcgttccagaccactgagacgcccccccccccaaaccaggtagtcagcatctaaggaatgacacccaaagtttcctccagcctccacacgcatatgcacacacctggacatgcacacaaacaggagaaccagggcccagccagaccacagatctgtccagtttatgtacagcaccccatggctgctatacaacagaagtaaacaagccagtaagtagcatccctccacggcctctgtatcagttcctgcttcctgtcctgcttgagttccagtcctgacttcctctggtgatgaacagcagtgtggaaatgtaagctgaataaaccctttcctccccaacttgcttcttggttatgatgtttgtgcaggaatagaaaccctgactaagacagtgggtaaaggcacttgctgccaagcttgatgacctgagttcaatccccaggacccacgtggcaggaggagagcgctgattcctgcaagctgccctgatctctcctggaatggcaggacaagactactccattttcaaagacagaaactgctcagacagtgttcccgtttggggttttaataaaatgatcccagagcctcatgtgtctggacacttggctcccagctggtggtgttatttgggtgttgtggaatggggtgatacggtcagactggtgaatatcaggtgtgtggtgggcattatgggatatatatatcccggccttgtttcaggtcctgtctctgtttcctgattggctgagaagtgagaagctgtactccctctgcccagaacaaagccatgccaggcaggatgcctctcccactgtggtggactgtactgtcttctttcttggaaccatgtgccgcaaaaaataaaataaaataaaataaccactaccaccaacaaaacctctcttgcaagccgggcatggtggcacacacctttaatcgcagcacttgggaggcagaggcaggtggatttcttgagttcaaggccagcctggtctacaaagtgagttccaggacagccagagctatacagagaaaccctgtctcgaaaaacaaaacaaacaaacaaaaccctcttgccccttaaattgcttctgccaggtgttttgtctccgaaacaaaagaaaagtcgctaagccaatacctttcaaaaccgtgaccattagactactcctctgagaccagctatttgaagagggctggtgacctagctcagtggtatagcacttgtctaaggtgcacaagaccctggattcaattacccaaaactgaaaaaaaaaaaaaaaactagaaataaaaaatgatttacaatttcaagacaacgaaagtacagcccatcaaggctacgggcagagctgcgcagttgcacaggttgtgtgtacacccacagagccggcagcggcaggatgtaaggtacagtatacattaggacgtttgagagctagccaacaacctgcacacttgataggctaagaacccaattaacgcagcccttgctgctaactcgagagagcagagcactggacacgcctgttcatttaactaaatcctcatcgcttacgtaagacagaaaagggtgagaaacccgcttgcccaagagcgcgcttgcccaaggcagcaaggttccaggatccggacccagaaccactgtctctgggtggggaagtgccctgaccctagcggggagggtgaggaagtgccctggcctctagcaaccctcccagactccacttttgctgaaagcgtgaggccaaaactcatttccatctctgagttccacttccctcctcgaaccgctccacccccccatgcttctctgcagcctttctcagcacacacgtgactcccccagttcccctaaatgccgcctcctctcgtctcttcttacgagacggccagcttgggattatatttgtgtttatttataatggcctggaatcaagtctgaaatgttttccggcagcagagagatgggagagtctctttaagggtttcaagagcccagtgaggatgtgagtggggcggagcttcgggtagccccgcctcccttccttccggaaagggtgcagagctcatattcacagaacttcagaaccagaagttcaagtcctgtgcaattgtgggcaaattgcttaacttccctgtgctgcagttcaaatgggattcctaacagaatagattttaacactgttaagttaaaaaaataaaataaaattttgaggcagggtctcatgtagctcagattgaatttgatccctctatatagccaaggatgacgctgaatctctgggctggctattacagacgtgtgccaccacacctagtttttaaagtaatagatgtcaccatgattggcattttcagggccacttgtgctatttttagagctcatgggaaatcctggagagactgtacaatgtcctgcttggaggagggcacaggtacttaggtcagacatccgtccacaatcaaaccctgttttactcttccagagatcggcttagagatgtcacttgtccttcctccctccatgggacttaggagactacacatcaggatatatgctggaagggaggactgctgggccatcccttttatctgcaggagagagcccacccaggaccaaagccagcacagggccagagagaaggggctgaggagacacagagtcacggtgacattgctcaagcccctagatcacgctgtgcctgaagcaggcagcttttagacttcctattctcaagagccaattcacttcccattttgcaaaagccactttcagttgggttttctcgaaggaaattatctaggccaacgctgagaggttaagcagcttggtccaggcacatgggctgttagaaatagactctgggcttgagattctgaagtgacagccatgtgctctctgacccaacccgggctccatggtgccctgggatatacagattgtacctcttcactctctctgaaaaagcaaaaccgctgggaaaacttaaaaggactttggagtttaattgaggcccaggcaactgtaggctgaagcccatgtcccctgctgccagcactggcttccccgcacaggtaatgccatgtcagggactggccaaccaggcagtccagatgcccaaatgtgctagggaatcttaaggctcagggaggtgggaccatgctcttctcaacctctgggctcccagcactgggtggttgagctgcacattccgagggactcagtctatgagaggcaaagaagcccttgtcatcctgacttctaaaacctttccaaggactggtgggggcgtggggaaaatgacttgcagacttccagctcaagggagatggtgttgggcaacacagcccagccccacttattcacagcatttacagttagtggccaagagaggctaaacacatcaaccagacatgtagtgtcatggcacgtaggaaagggatggggttaggggtgggagttatcgggggaggaacaggtttgtcctagatgaagtgacatgagaatcctagcttgccagataccttggatcctaagctctgagctgtgctacctgtaggctgatgtccctgtctgggccacttgctgacctcattcagtcaggggtcagcaacagtaccacgctttgaaaacagctgtcctggaccggagaggtggctcagcggttaagagcactacttctcttctgaaggtcctgagttcaaatcccagcaaccacatggtggctcacaaccatccgtaatgacatctgacaacctcttctggtgcgtctgaagacagctgcagtgtacttaaatataataataaataaatctttgggcccgagtgagcagagccagagcaagaagaggtcctgagttcaattctcagcaaccacatgatggcttacaaccatctgtacagctgcagtgtactcatatacataaaataataaataaatcttaaaaaaaaaaagaagagaaaggaagccagctgtcctgctctacctgcgagtcctgggatgatcaataagttggctgatcactgacgtacagtattgatttcttcccttagtgtcgtggctctcaaccttcctaatgctacaactctttaatttatttcctcatgctgtggtgaccccacccccaaccataaaattattttcattgttacttttttaaaagaatgtattatatatatatatatatatactgttgctgtctaaagacacaccagaagaggacattggatcccattacagatgtttgtgagccatcatgtggacctctggaagagcactccttgctcttaaccactgagccatctctccagcccttgttgctactttttaactctaagtttgctactgtcgtgaatcgtaatgtaaatatctgtgttttcctgtggttgatcttaggtggcccctgcaaaggggtttggacccacaggttgagaactgctgcctgagtagaatctataaggagaaaatccagaacctgagagtgaggacattggagcattcgtcagtcttgcctggccacacatggctgccttgtttacttttaaatcagctatggccatagacaggtttgggggtgggggtgcttccgggcagggctggctttgtccatagggcttgggggtggggtggggactgacacttaggtcatagaagtccctgttctcagcaaatgtcaggtgcttggaacatggggatggtgaggttgtatcctagtagaacaggactgccaggagacaaggcagcaagcgggcacagcagaggacagagggctttccctccccaggagccagcaagcaggcacagcagagggcaaggggctttcccttcccaggcaggtgacactcaacacgtgacttgaagggagagaagatgcacaagcagagggccctggtcaggactggatggcacaaagatcctatggtagaagccagccactcatactggggagagataaaaaaaaaaaaatggagggaagcagacaacagagagagggaggagaggcagatgggcccgtcaccagggtcatctgggtatgggagccaggactaggaatggatctttattctttttaaaaagatacacatttgtttatttattttaagtgtgttttatgtgcaggtgtggcatgtgtgtgtatgtgtgtgagtgtgcctgttttgtgtgctccaatctattttgggtgcacacacacatgcacgtgtatgcgtgcgagtgtgtgcacatgagcatctgtgtgtgggcgttaacacatgtgcctgaagaggcactgatctcccagaattggatttagatgatagtgaaccattttgtgagtgctgggaaccaaacggtagccccctgcaagagctgtaagtgctcctaaccgcaaaaccatctccagccctggaccagggttgttttctaagcagaatgaaaagccggcgtttttctctggaaggcatccccatgtctggtgctgatatacagagagtggatatgagacactgatactcagcctctccttcagggtcagtacttctcatggggtttcattgtctgccacttcagtgggttacatgggggcccctaagaagtcacgtcaccaatgtgacctcatttgggaaaagagtctttgtaaatgtcattgacttaggggcctcaggaggagatctggatctactggactggccacttatgtctgggacacaatgacaagtgttcttacagaataggcggtgggtttgtcagacaggaggaactagagaggccctgtgaaaataaggcagaatgatgaactacagccaaggaaagacagcctgtcagagctagaagaggcagagaagggccttgtgcatcaatagtaccaccatgcagtcaactccggggcttgtgaacagtgaccaaccgggcctggtggcacaggcctgtcctcacagctattcaagaggctgaggcaggaggatcaaaagtttaaggcctgcggaggcactttagtgaaactgtcaaagaaataataaaaagagagaccagggtatgaagctcagggttagagtggctgccaagcattgtggggggccctgggctctgccctgagtgtgacaagaaagaaaaagacatgaggggatccagtccgggggcgggggtggggggtaggggcgcaccaggcaagcctgagtaacatttgagctcaggatgggcacttagcttggtgtactgggaccccacctcccagagtcgctcacataggcaactacttcaattaggcaacttccaagtgtggagtccccaagttttccccggaatggtcaactttaattttcttagtataacactctgtttctaaggatgtttatcaaaccagctgtctttattcagcaagaattaatgggctggctagagggcttcctggatgaagctgcttgctgccaagtctaaagacttgagtttgagtccctgggtctcacacagcagaaggagaaaactgatcctagcaagttgtcctcagaccgcaaaacgtaacctgtggcgcacatataactaattttaatggggggggggggaatgaaatctacctgtttgctactacttgaaaagtgactgagccccttgatacagtaagcccctcccacgaggtaggcagtcttatctttctttcacagtggagaaacccaagggatccaccacaagcacatctactccaggctgcatccagtcaactccacttgctcaggcccagagatttacttattattataaataagtacactgtagctatcttcagacacactagaagaggacatcagatcccattataaatggttgtgagccaccatgtggttgctgggatttgaactcaggaccttcggaaaagcagtgcttgtaactgctgagccatctctccagccctgcatcatgggtcttagaccccaagtctagagccctcagaagcctggctcctatgcaagatatcctccgacctggaacccagcctcccttcccatttgcaagactgctttctttgtggctttttgagacagggtttcactatgtaccaggaatttgccgtgtagacacagttaacctcgaattctccacaatcctcctgcctcagcttctcaagggctaggattacagacatgtttagctgctaaccctgcttggcaatgctgccttggacaagggctttgtctgtgtgctttgctcttggcagctctaagatgggaatcaaaatgcctctgtgaggggggattgtggagagtaaatgaacatgggcccttttgcctacctcagtacccttggagcaaactggaagtcactctgtcacaccaggagctggcactgggcacaggacacggctcctacctatgtctccctttctatcccagaatggaagtttacaactccatgttccagttacatttccccagggaaggcaatcccatccttcacacatacttcaaggaacccaagcatcggaaccaacattcagtgctcaccctgggcagtctgaacaaaccacagaatctgcacccagatgacatcagagaggaagattttttttttcttttaaacatgtttttagatttatttgtatgatggttttgtatgcatgtatgtacagtagtatggtatcacatgtataccctgtgcccttgaaggtcagaagacggcctgaaactagagttaggatggttatgagtcaccaacaaaccccaaggaagattttttcccttttggttgtttttttgttttgagaaggggtctcactgtataactggctgtcccggaacgatgtagaccaggctggcctggaactcagagaccccttgcttctacctggagagtttaaaggcaagtgccaccacatctggtcaggattttcttgatactggagaaagacagaaaactagcaccacatgtcccatccgttcattctgccagggtaaaaactcttatggactttcccaagtttcatgagagcagagtggccagctgggtgttagcacctgtccaaaactccggagactgaggcaggcagatccagagctggaggctggcctgggttacgtagtgaactccaggccagctcgggctatagagtgattcgttgtctaaaacgaacactctgctcgctgggatgtggccggagtaggtcctagcatgcacggagctctggtttatcccccgcaatgcatgtctgtgattccaagacgtgggagatggaggcgagaggatcatccttcgcctgacagcaaataagaggttatccttggcctgacagcaagtgagaggccagcctggaatatcgtgaccctgagttaaaaataaagaacggagcccgaagtgatggcacacacctttaatcccagaactcgggaaaaaggcagccggatttatgagttcgaggccagtcttggtctacagagtgaatgtgaggacgtccagggctacgcacagaaaccctgtctggaaaaaccaagacaaaaaggaaaaaaagaaaaaagaaaaacagaccgggacaggaaacgccgctcccactcaaccgcccagctcgaggccacgccctcgccgcctgactcaaccggcgggcttgaggctcgaactcaggatactccccgagtcccgcctcggcccacgcgccgtgggcgcgccgccgggggtcgcttgggcaacgggcgcgcgccctccggagcgcggaacccgggaagccgcacgcggcgcgcgcagcaagtctgctcctcgggttcgggcctcgtccgcgatgccccgcctaccgctccgcccccgcggaagtgccggccgccttttcgctagctgactggtcctcccgtacagagggcggagctcgcggtgaggcgggggtgcgtacttccggctgccggcttgacatgcagaagccgctgctggggagcttggggctgcggtggtggcgggtgacgggcttcgggacgcggagcgacgcggcctagcgcggcggacggccgtgggaactcgggcagccgacccgtcccgccatggagatggagaaggagttcgaggagatcgacaaggctgggaactgggcggctatttaccaggtgcggagccgggggcccctaggccgcgccgtctccccgaccctcccggctcgggggactcctgtcgcgcatcctcgtcgccctagacccctcttggggttcgcggcccctgcgacacccccactcgcctctatctctccgcggtccctgtcatcttcgagctccccccgcaaacccgaccccaacatggcccagccaccctttgtccccactggtccacacccctgccgcttccttgtctggactggaccacctcaggccctcttcctttgtctcctggggaggagggtgggctcgccgacacccccgccccctcacatttcacttcctcgggcctcggtgtgcggtggtggaggcccggggatgacagcccccttactccttcctgtccattcatttgttagacgtgagctggagggtctcttcggtgctaggctttggagctggtgtgtattgaacgccaccgtagacctaacctatccccccccccccgagaggctatagtcacacagacattcaaatactgatcattgcatctggtgacaagtgttgagaagagaaagacctgttctggtggagggtgactgtacgcaaaggggctgccttgtctagggcatcaccggcagggctgctagcggctcgacagggaaggagacttgctctttgaatagaccaaggagtgacaagccatgaggttaggcgactaactagggggacacagaacccattcctatagctgcctgaccctctccaaatggcctctttcttttgtcttttatcctttgaccgtgagctgagatggtttctgttttctgtgatccggtccacttgaggggttctggtggttcattaaaaaaaaaaaaagtattatgaaagtagggttctcccccccaccccccgccatgtatgaaacagtgaattgaaaatgcaaagatgtctttgcaagcagctaagtcctctaaagaaaacaaatcttccgattaaatgtcagtgcgggggttgtgaggattaaccatactcgccaggcatcttaaataagcatgtgcaaaatagatcctgttcctcgggtaaagagagcaggcggtttattctgctttcagcttctaggttcaaaagacagcgggtgagacccatcagctggaaattgaaatctattttgagcttcacttaggaaagtaggcaccctcaggctgttgtttggtgttcttgactgacaaaaccttttttggggggttgccttggtttccagattctttgacagggttctttttacttgggcctcggtgtgctcgtcagcttttttggggggcagatatttgtagctagtgtaatctgtgtcagtcgagcgatcaattgtaacatttgtattgcacgtctagtctatgaattggctggacagattccactaaggagtcaggtctgtgggcagattttctgtatcagattaaatgcaaggggatcccagtgtaacaacagcacgtgaagattgttctgtaagccactctgatgtgtggaggttgttggctaaacagaccgtcccaagtggagaccgttgaatctttagtactgagacagacttatttggtaacaaattggcatcattaataagttatggtagaatgtggttttttacgcttttaggttagagtggcctgccccgacatctaagccttgttaaagctggcgcagagtgggctggctttgaaatctgttttcttcattcttctccaatttctcctccacacttaagccccacacgttagtaaattgctagtaatagtaatagtaagccccacaagttaagtacgatgccagggtccgcacagcctgttcacaagtgcttgtgcccttggttccccagtgtgaaggttttatgttctctctctctctctcttctttttgttttttagagataaggtttctctgtgtagccctggcagtcctggaacttgctctgtagaccatctggctggctttgaactcagagatcaggctgtttttgtttctggagtgcagggattaaaggagtgtgccaccctgcatatttgtagttttgaagatggttatggaagtgctcctgttttacattttaaaagtagccttttgacttacagttgtgagcattttgttgttgttttattttgtctttttgctttttgctcaagacaaggtttctatatgtaacagtccttggctgtcttggggctccatttgcagaccaggctaacctccaactcagaaatcttcctgcctctgcttccagagtgctgggatcaaagatgtgtgcttcaattgtgccactttttaaaaccagtatttgaatgaccttgagtgaatgacctaaagctgtttttctaatataaaggataatttctctaaaccttttgtttcagcttaaagaaaatatgtttacgattggtggaaaataaaagggttgagttgtttttttttttttttggtttggtttggtttggtttttggttttccgagacagggtttctctgtgtagccctggctgtcctggaactcactctgtagaccaggctggcctccaactcagaaatcctcctgcctctgcctcctgagcgctgggattaaaggtgtttgccaccactgcctggcagtttttttgttttttatttttgttttgttttgtcttgtagtaagtgtgtgacagcgtgtcatagtgggcagccttatcagaagtcctgtttgagcttgtcctagttgagagcatgcagctttgctatggctgtacaagcaaggcagcagaatcatttccttattctaactcattttctactcagaccaagaaggtctacaaactctaaaacaaatgggcgaagaccaaaaggtgaagcagacgtttgagatctggggaagatggcagtggaagaaaaacannnnnnnnnnnnnnnnnnnnnnnnnnnnnnnnnnnnnnnnnnnnnnnnnnnnnnnnnnnnnnnnnnnnnnnnnnnnnnnnnnnnnnnnnnnnnnnnnnnnnnnnnnnnnnnnnnnnnnnnnnnnnnnnnnnnnnnnnnccccttgagcagcacactttttgggaggaagcctgggtgctttttaatctttactgttaacaggtgacggatgatataggtctgtagagttgcatttgtttgcatatggaaatggctgtaagaatagctttctctctttgagcatttgcaaaggaatggtaagactaaaggagcagtgtgtagaggactggtcagagaagagactggcttagccagcccagggagagaagatgcttgaccagacggaagggctacctagggactctggcctccctcagtgtggcagaggtgcttactggtcaggtttggctttttcttactgttcagtcctttgattctgccactttcagtgagtgatttgttttggataatgagcatctcccaccccagtagctcctgacttgaaggcaagacagctctgctgtagatggcttttctagctgatatgtgttatagctgccttcattctgaaatagaacccagtgcctgattggtttaaagtcctgtagtgtcagtaatgccctaaaattccttactggtatagagttgatactgtcacgctccaagagatgctcttacagtattggacaccactgcttcaaagctggggaaactatactttgtgcagaagagatcaagacaccatgactcattttgatgggtgggggttggggtatagaacatagagatacatcttgagtgacccttgagatttaaatgttcttgcttgccctagtttgcatgaactaaatttaggcttctgatgggcactttgaggaggtgtgaaggcctttgaaattgtctgggctggtaggaaatgaacagggagttccagcagagccaagagagctgcaccccttgtccgctgtccccagcgtatttacagtagctgggctttctgggagtaagcaggacccattcaacctccacagcagcttggagtagtagggaaccggggaaaggcaaatgctttttctcgttttcagctcccagatccctctgctggggggcttctgtcctgtctgctacctttgcattttaataggaacccaggacctggtatttattgagtaatggaattaattgctggtatattgaaattgaagtgaatgaaaagttccctgtagaggcctttggatgataatctactgagatgattgctttttctctttgtctttctcatttgatgatactgggatggtacccagggcctaggcaagcaatgtaccactggaccacctccctggtccttgggggtttttgtgttttttttgtttgcctgcttgctgttttttgtttgttttgttttgtgatgcatcttgctgtgtggcccagtctggactccgtttttttttttcagctgttccttcatcccttactaacctgagccccgccccatgccccgccccactccccattaacctgagccctgcctcgctccccattgtcccttttccagtctcttctttcaaaaattcttttggcagtgtcttccactttgggcttgtattcgtaagtgccttgagccctacctgggcgtctatgtatttgtatctcttcccttcttcccttcagggttggtgctaactcattcccagcagcagctaatcctgccatgaaggctgggcatgctctagaaacctagaatcctacctgagtcattgcttctaggatgacatctgcacctgcagtgccctgagtgggatttgagtagataggagtgcttggctttgcctagttctgagagtcccacccctcctttcattgcttggttaccctatcacccacctcagtggtccaagtgcccactgagcctgcacctacttcttgttgatactgcagagatgccaagctgcttgcctttattttattgtatgtccagtctgtgtgtgtacatgtgcacctgtatatgtgtccagtctgtgtgtgtgtgcatgggcagctataggtgtgtccagtctgtgtgtgtgcatgagtacctgtgcactgggtgttggtcttccatctttctcatcttgttcataacaggatgtctgtgtcacggctgcttaggccagaatgcctgactcacgagtgtccagggattatctgcctctcatctcatacagccgcactggggttatagctaggcctccgggtccagctttacgttggttctgggggccctcacacttccataacaagcactttacccattgagccgtcttcccagctcttgctggttacttcctaatctggttggtcaggctttccacccccacccctaaccactcttagactttttagtttattactaatatgtttttttttctttaagacaaagtttctctgtgtatccctggatgcttctacttcccaaatgttgggattaaaagtggctgtggtcccctgtaccaccactacccagcttgttttaacagtagctctgaggctttccgttttgtctgactttcccccaactcctaagcccggacagggtttctttgtgtagcactggctatcttggaactagttctgtagaccaggctaggcactaaaatacagagatccacctacctctgcctcttgagtactgggattaagggtgttctttgacaccacccatcgctgctgagtctgggtcttatgggatgttaggaaaacattaaaatactcatacatggtggtcgtccatacctttagtctcagcattaggtaggcagagacagctctagccatccttgttcaaggccatcctggtctacaaagggagtttcaggacaagccaggctacacaaagaaatcctgtctcaaaaaataaataaacagccgggcgtggtggcgcacgcctttaatcccagcactcaggaggcagaggcaggcggatttctgagttcgaggccagcctggtctacaaatgtgagttccaggacagccagggctatacagagaaaccctgtctcaaaaaataaataaataaataaaaataaataaataaataaacaaacaaataaacaaaccccaagatctaacccgggtggggtggcatccaggtggccttggtcccctgcagtgcccagtaggtttagtcctgcactgtgatcacacttacctagcgtgccatccagcttgcaccttgcagctcaaatgtgtgcctcctttcatggaattccgtcctgggtcttgtacactgcctgatgttgccctgtgcttgttagaactgccactctgtatcttggtccatcccagagcccacatgccctgtggtcactgactgtggcacccacctggcataaagtaagtattctctcaagtgtggtgtggacatggctgcccagagatttagtggctgtggtcccctgtaccaagctagtgatggggtcaggaagatttgcacagagagcccaacagtagggttcctgccatgggaagccctgtatttgagccgtgggccaaagaagtaacttgccttcatgtggcttcccagagaaactgctgagtatgctgagactcgttgcatctgcccacctcacagaagtctgaggtgtgacagtgttccctctgtgtgacaggctcagtagacagcggagtggcaccacagctttctctccaggcctagtgagctcctctactcaagtcactcttgacatgattaatttttggaaataagatatgtttctctgtcagtcaacaaccttaccaatccttgtatttcttgaactccagttagtaaaggcaagcattgttcacctttagctagactgtttgagcgtcatgagaggagtgtaaccttctgctctcactgcctttagtgtctggcagtggattacaggctcagctagagctccatggcgctcatcttcctgcctcatttcttcactcccctgtctctccgttcctcttgtaaaatgatcctgagctgacttaagttcacctccagtaataaaagttcttaatgttcttgaagtagcccttgtaaactgcaggggtctgcacaggtcatatggttaggctcaaaatttggtaggtctgccagtgtggctagcagcttaaagagttgggtaggtttgtttgtttgtttgtttttcccctcaagggacattcaaggttcttataagagggcttcctggagtgagtgacgtgggaaagcttgccacagttaggcacccctccttgagacagtggtgcttgggtggttttcctgtaaaaacagaggaaccgactctggagagttcacaaaagcggggaattgatggggggggggggagctgcccttatgttgtaattttagaaggaacccacatctgctctcagcttcatttgaatgagaagagagcttatacatctgccagcctcagagaaaagtccctaagtccccaccactggacagagccgttcactgtggggacactcccactctgcagccttcctctctcgacagcatttaacagaagcctcagtagcttttcttctcagacagggtcctaggcatcccaggctggctacgtgtcaaggatgaccttgaacctttatcctcgagtccacagcactgtattataagtgtgagccgatgtgctgggtttatgtcgtgggggtggggtggggggtatgaatggctggccctctaggctagcactctgccaactgagctgctccacacccccaggccctttaactttttgacacaggtttgcactgttttgctcaggctgctccaagctcacaatcctgtttcagtctccgaattcctgagacttgagtcatattccaccatacttgacacatctcaagcctcttctgacaatctgtagattctgaatgactggcaacagggccatatctcacaggatgcctttcccattctaagcctgagtctaacgctcctacggctttggcataggtcacactgcagacactgtagacaggccactcttgtgagtgagggctgctcagctttgtgtgtgatggttcacttccaagtgctcaggatgctgtttagtctgtgactggagctttctggaccccaacactcaactagctagcaactgctttaagacctgagccctgcagtgtgtaccaggagtcagcattagcttgctggctaagtgatggctctaggttttctctgggaaaaatacgcatgttcgtgttcttttcatccacctgcaagtccatgccaggaacgcctgatgagccaccagagaaggggctttggggaccaaatggtctcatgtccttaacaactcctctctctgcccagagctgcttttctatatatggagacgcctgggctatggctgtggcttttgtggctgagtggcactgcttacagaaaggatgaactgggttcccagagtcattctgaagatgcgttggtcggtcagagagaagctccttgccacatctctgtctccaagtagttgtactgtgctctttcgtctttttcattggatcgtacggtcacaccgtttcctttgagaaagcattacatttggttgttgtgttgtgtgttcaccacgtatgaagtcagaggacactgaatcagtcggttctcgccttctacctcgtaagtcttggggatggaacctgggtcaccagctggcaggggtgcttttgctcaccaagccatctcaccgcctagcacacctcttcccaaggaggaggcttacttaaaaatgacagggtttcagccagtagcttgtttttgttcattttgagcagactggcctcttgaaagacatgtgctgctgcagaggtacctacaagaaggcacatgccagtgactaccccaagtgacagctctcttcagaggtgtgctacctaagggcatctcacatagagtcacttctgagcacagcttcatccagttgaaaagtaaacagactgcactgagtgcatggcagtgacccaccccaaaggagctgttggggtcttttcctccagtgtgggttgtgtctgctttgcagtcccagtagggtgtcttttactcccaataggatgaaagcaaaatagaccctccctgagctaaatgtgtgtgactggctttgcacttaagggggacctgggagagaacggccaatggtgatggatgcttttttcatcacacacacacacaagttgtgtgtgtctgtgtctgtgtgtgtctctgtgtccgttctgtctgggtgtctggatacaggtatacatatgtgtgtgccggctcacatataggccagaagagggcataggattccctgctgcctgcgttacagataggagtgagctggctttgggtctgggcactactgcagtcttgcaggagagcagcaggtgctcagtgctcctggggtctctgccaggagggcattttcttgtagtgattactttggttgttgctctgccttttgtgtttcctctgtgattgagtgagacccctgctgggattgctctccagtgcctgactccgactcctgccaccttgcaggtggggtggggctgtatgccgctgaggaggaagctatcctcgtggcagccctagtttcagcaggtggtttagcctgatctgagtaccagcaggcgcacagttctccagaactagagaatctgctgtctcttgaagctgggttccaaagggttctatgtcccaatcatgtgccttcctagattgccatctgtgccagggtgtccctgacaagacaacagtgcccgtgggtctgtaaagggcgcagagataagccagtctggagacagtttcagggcacagcatcgactttattgcatgtgagcaactacttacatagtggaagcctaattgactgtgatttgagtaagttacctcagattagatagtgagtgttcataccaccagggtctctgtgcatgttagagcagctctggagagtgcagtctgggccacagccagctgctgctgctcatgctacttcagaattgagtgttctgacctcatgagaaatgcagtgtgggaggcaggctggctgccagctcatgcctgctccgtctcctgtgtttctttctcttgggtaaatcctagctgtgtctgtgccatggacggtttgctgctttctgttcccagcatagggagctgtccacctctgctcctctctcttgttcttctccccgccactgagactgctcagccggtttgagtgacagcattgaagctggccaggagcagatggcagattctgttttcttgtttcctcctttgtaaacttgaaccatctctcctcaccccaaataaacccatcacaaaattaatcaaaagcagttacactgcagagggaatcgctgtgagacgccaaaggttagcaagcaaaggctttttgtgaagggctgttcttcagccttgctccacccttgttggcattaccgtggtcttgccagtgacactgttggaagttgttgcctttgaaaggtagaggtgcctggctttggtagagaggcctcaggaggtaagggagcggggcatttcccagcctctgttgccatgcagctggagatgggtgtgggccatcctccacaacttcctgtcttcagtgtgagggggtggcggttctctaaccactgaagaactgtgtggaacaggctgtttatttactgggcaaatggggccctaatggctgcctttggctaatcgctaccctttggcagtgtccattcagtgtccggggcccttctgggcagagctaagcttcccttccaacgtttgcagacgctcttcacactggtgttagtgtagactgatcataaaggaaacgatgagtgtgttcgtggtctgtgctaattttagtcttctgttcacagcccattttgtgtccttcaccattaaggctccgtttctagaaagacgcgttttgaatgtagggcactgcctgtgttctacccttggctccatttcaggggtggccttctcagtgctctgaggtagtgaccagagcctcccaggtaggagcctgggagattgtttccacacccactcctttgcttagtgacactctgctgtccctgcaagtcactctgctttgtctgaagtgtgggctctcggcaaggctgtcaaggtcattgtgcagtgtgccacacacaggctctgctggctgcctgagacgcctgccttagcatatgggcactgttcatcttggcttctggttactcttagcaggactctgcatgtcaaagctttagtctcagtctgcatggctgcccttcattgtccactctgagcagctacttcccaaggatggaagataccggggtcagagtcttcattacctggctgctcgtgggtctttaaggagttgcatagggtccagtctgtgacatgtggagtgaaaagaactggcttgacggcacaacctgcatctgatgccctcaactccttaatccctggaagagctagaagggggctggcattcctgggagaatggaaggaagctttgtgtctgtgttgggcttcactgtggctttgttgtgatcctgctcagctacaaggggacacaaactttaaatttttgtaataccccagttaaaactttaagaacctctgttcatctttagaaatagaaaatgccctttgaggttgtaaatgagatgtataatttaccaagtgtgaagttgcttttgagagtcttgtctaaagtgggtactgttggttgggttttgccatcaggccccagctttggtctgccacactctgcttgttcaacatagtaccccctgtcttgagttaggtttgtgctcaagttctgtgcagtaccttcatacccctggggtcctctgagtggtagcccaatggtaggtctatgatagggagtgtttgcagaagacagttgggtcatagagcctcagtgtttttcaccagctccccagtgacttcagtccaccttcccagctactgctggtgtggccactgcctgagctcacatgtacacagcttccctgggtcatcagggtgattggattgtagacttgacctttgcctggctttgtaacctcctacctagatgtcacaaatggaccccccaccgtcatttgctttgtctgtgtgcactgtgtaagactgttgatgaactgggaggaagcaccacacagcttagaacctgggtcctgctgtgagacctctcttggccttggtcctggagccgatcgagggtcacttcttctttggatgaacatcatgtctgcattcgttacttgcctcagtcccatggccttatgctgttctggatgctgtgtggtgctgatccctggggccctgaaccatgcatggcaggctgcgttttttcaaggttggtgttagtggtgcggttgaagtggtgtttgatttggaacatggctggtgtggtgtcacaaacaaaatcagagcatagaggtgaaggccggtggcctaagagggatctcctgcctgaaaagtacagagtagaaccacccgaggcaaggcaggcctgctttcctgctgcctcattcttagtcctttgtgctttaaaggaagttggaagtcgccatcaccatttttccaccgcagacaactgaatgtgattatatttttgtcctatgttcagctatttccaagaaccctttttgtgtgcatgtggtatgttttatagtctccttgtgtaacccagactggcctcgcatctccttatccctcggtctccccagttctgggactgcagtcctgtgtacatgcttgacttccaggaaccttagttgatgaccaggctggcagttgaatccaatgggccccatgggaatgatgaaaagaaaaatctgcccaagtttgcttataccgagaaacggtcgacgcttgttttaatgcctgcctcactctgtggcttggttaggaagggtgctacgtggccggtgtctgagtgtgtgctcaatgattctccagtctgtcccctctgtcaagggatgaagtcagagagcccgggaagacttacaaagagagtgttaaaggcaacagcagtccctttagggacttatgggacgagctttctctggaacacctgtaactcatacagatgtgtgtgcactacaagaaaaaaacggagccatagtttttggctgttctttaccctgaacagttgggctctttgtcctgcgctttgtaacttcccccacaaagccgagtccctgaaggccacaaccagttagcactggaacactccctacgctgggcagatggcatggtcacagctcagggccagggccaaacctctctcactgctctctcctagacctaagcccttgctggccagcatctgtcaggtgcccagcagccactgggccccagcctctgtgtcaggcagaggcgatccaggagctccctgcccttagaagcttgtagttcaggtgacagacatcccaggtcacagtgataggagctttcctcccacagggagccagtaacccaggtgcaagataacacctgtctgtctgtctgtctgtctgtctgtctgtctttgtgtgtccatgcacatttcccttgtcttctttttatctgttccctctgtcagggtgacatggaggttgtagtagttaaagagggtaggcagcgcacactatagacaggagctctggtgttcattgtgagaaagtagcttctcctgcagagaatgacgtaaagatgccattaaaaaacagcctagggctggggagagggctcagcaggtaagagcactgactgctcttccagaggttctgagtttaattcccagcaaccacatggtggctcataaccatctgtagtgggatccaatgccctcttctgctgtgtctaaagatagctatagtgtactcatataaataaaataaataaatcttttttaaaaagaaaaaaaggaatagggcttaaggatgtagctggcccagcatgcttgaagtcctgggtttgatccccatcactgtgtaaaccaagcatggtggcgcatgcctaggatcccagctctgggaggtagaggtaggaggagccttgactacacagtgaatttgaggccaccctgggatatgtaagttcctattctaaagaaataagtaagcagactcttcagacactagctgtcatactaagaataagttgaagatgtttggccagccctgatctgcagcaggcacctagaataaaggcattatttatttgtggattataagggatatttttagtgatgttggctagtttatcgtatggcctgtttattagtagttcttgttatccagatctttgagtgatgttcaagtctagtaccttgtaagaggatttaagatcagtgataaccaggcagcggaggtggcacatgactttgatcccagcacttgggaggcagagacaggcagatatttgagttcaagaccagcctggtctacagagtgagtttcaggacaactgaggctgcacagagaagtcctgtctcgaaaaaataaaacaaaagatcagtgataatcatcttactaattcattattatttttataatgttctacatgctaggcaagccctctagccctgagctggatccctagccctctttccacttgtgtctgtgtgtctgtgtctgtaggtcagagaacagcttgcaggagttggggttttctttctactgtgtggagcctgggaatcagatgcaggttgtcaggcttggtggcagggtcctgattgctaagcattctcaccaatgcccaagttctgtattttagacacagagtcacattatgttgtccaaggtggacagctcatgatcttcctgcctcagccttttcatgtttcagtgctaggattcaagcacaagctgtctccatggatgccagttctctcactttaagtggctgagttacagactttaggattacaacttgtgagacttctgtggttaagtacatttaaaaacaaaaattacctcacgtagctgtggatagagcactgcttactgcctgtttttccagttatattcatcaaactcctaatcacataggaacagtccaaactaattatctgcagacaccatccttgtgaaaacactggctgtttacttttggggtggtgatagtatgcattaggcagtgctctactactgactggtgccctcggcccttcttcccttctttcaattctggttaggaacatcatgcagcagagcccaggcatgagcccagcacatcacactgtgtgtgctgagaatggaacctggcgtctccatgtcaggccagtgctccaccactgagccacatccttggccaacacaagtagttttttaaaaataattcttgagctggacatgataacacacagctgtagttacagcatttgggaggctgagacaggaggattgtgagtttgaggccagtctaggttacacaccaagatgcattctcagaatggcttgaagacctccaagagaaggcttttccctatgggtggatgacagcgtaagaacaggcagtgcctggtttgtcttcatggctgatgagtgacttggatgggactgtcccatttggttttctgtgctgtcctttgtatgtccaagtatgtaccttagggtacacatgggaagcacagtggtcaagccctgtcttgtctcaagcctgtggacctggttgttgagacacaggtgtctgtggtcaaacgctagcaccaggcaagcacttgtcagagagcagtggagatgaagtgcacagtacaagctgcctcacaactagttccttagttctgctctgctaggagagggaagcccttgaggtcggggaggtgcaggtttgtgcacttgcccctcctatgtgctttgggctctcttaagttgctgtgccgggcactttagctccaggccttgtgatactttaagcatatcattctctgctccttcactttacctggctcatggccagtccacctgcctccccaagactgctgcaccaccctggactatctcagactgacccagtcccctggtaacgtggtgtcccatgggtcctgctacacctgccccagcctttgaaatcctcgaagcccagacggctcacagctccctcttccatggtccttaatcgactgctcccctctttccggcatgctttctcctgactccaggtttccagctgctcctttcttgtcaagaccatggccagccattattttattgtatttgaaattgtctttctgtgtaaggtagctcagactgtcttcagtctcacgtgtactgcaggccttcctgcctcggcttcccaggtcctgtagctgcagggatattttcgcagtcgattagcgctgtgcgcattgttcaccttccagttactccttggcactgggactgtgggcttcatgttcccaagccgctgacatgatgtctggcgcgttgctcccctttgctagctggcttcctctttgatccgtcggtggacactttaccttacaccctgagccgggcagcgtttagtgtgcttgacctgtcctttgcttgcttgcttgcttgcttgcttgcttgcttgcttgcttgcttgtttgcttgcttgttttggtttgtctgcttgtttgggacaaggtctttttatgtagccctggctgttctggaactggctacaaagacaaggctgctctgaaactcagaattcttcctccctctgcctccaagtgctaggattaaagttgtgcaccaccatgccctgttctgttctgtccttgaccattgtttggtgctggggagtgcactcttcctgtgtctcataggcatattagctaagcccctaccaagcctggaaaccctttctgaggaagaactgtgtaacacctgctggtggtgactctagcagaatcttgcatgagcctacacttcatctcagagggcctgtccaggccatgttgatgcatgataggactgagttcctcctcgctgctccccctgacatgtgcatgacttgccgatctagctttgtgttatagggcactgccagagagagagagggcatcggtgggagccaggctgagctgagaggaagtggaggggctgagtcaggccatcaggctgcaggaagcagcttccttagcatatgcctctgtggctggggagaagggagtcgtgtgttctcagcgttaggtcattctgaccacgttgcttctgtgttttcatttgtgtggtatttcctgagattctgatcttgccagaaagtgcccagcaaaaattctggacaagtgaggtgtttctctgcattggtacctaaccccctcttgaagtgttatcctggtccagccctgaagaccattcagggcttggttttttggacactccttccccttggagcttgtgaaatgagtggtgtggtttgaatggagaaggaaggccctagtctgtccagggagtctggcttgtctatcctggccctgccagtctgctgctcctgtgcagagagttgtctggggtgcttaagcctcagtgcatttcacacaagggggctcactcctgtgtgaaggtgattgagtttacagcagaggcatttgtggtcttctgtgggatgagcagaactcctctggtgagtgacagcaggagacagagaagatcgactatgatcagagtgcacagagcaggcttgtggcctaggaggaggcgtctgccctgcccagcatcctctctgtgcagctctgctactgtggagcctcaagtctccattctccccagtttgaaggggacagacactgtgcccaggctgctgatgtgcccagccagcaagaccaagcctgtagctccccagatctgtgtaaaaacagagctttgaaacatgggcccacctttcttagagtacaggctgaaggttagaagtggaagagatgagaatggagtggtcacaggactggtatggaggctggtggggtttccaatgtataggtctgggctgggcctatgctgctatagccactgcagtggccactagcagttgcagacatgggggaatcttagggctgtttccctataagaaaacaagcatgtgacatggccctgggcttggtaacccagctctgtggcttctccctgagcataccttgtgatgccgcacaggctgcaggcattctggtctgtcatggctactacttgcctccgtgtttagggactttctgtacctgccagtgcccactgaagaagatggcaaaagcaagcatgagcttgtaaccacagagctgaataaacactggaaaatggacgatagtaaccttcagaaacacttgtttttaaatgtccctgagtaatcagttctaaactgagagaggctttcataaaaactgtccaggtctcagtgtcccaggacacctggcttgtgaggtacacagcaccttcaattgtacctgggtcacttcacagaagagtgttgagatggactttccttagctggcacaggctcagaatggtaaccatgcgtgacagtacagacagttctccgtggatgtgccacacctcaggagctcggagtttgcttggcactcaggttgtgttttcctgtagacactgccggaagttagttacatgcacaccctgcacgcagcataaagttacataaacccccttagtttacctgaagctctattactatcacatgacttcatgtggcaatggtttttatgaatgagtagcattggggttcgcctggaggcttatgtctgcctgcccctttccaggctcctacgccactggaggcaatctttctacctgcctgcctgcctgcctccctccctcccttccttccttttaagtcagtctgatgctgagggattcagtaggacagagtgatttgggctcagagtaagtgtgagccccagaactatcatcaggctagagtcatggggtctggagagcagcgacaggcagctagggcgtcttcatggcttctgtgctttatggattcccaggtaagagcccattgggtgtttgcctctggtctacagagtcagtcgcctatttctggaccgcatggtcttctgtagcagcctggtacagtgtcaagtgctttgcagggttctcatgagtaatgctgcctgccgtgagggccgtgggacccaggtgactcatcgcagacatgcatgaactcggtgtcactcgcatccctggggagcatgttgcacaagaagcagcttttagctgcagcttcactgccctccgaggtttctaacttcagttcagttttcagacaaagctcattgtgagaggccatgaacctacacaggcacttctacccatcagtgttggagagcacctgtgtcagagtgcagcaaggactgactgcataggtctctgggcagtagctgtccagtgtcagatggctccatgtcagcctcattggctttgggacaaggactagcaagcaacctgtggcaatttgatttgtcacttcagtgttcattgcccccttcctgcacttacaaatggcctttatcccaattggccaaaggtgtctgtgggagccaccctaataggtcatgaaatgctagttcgtacaggcatttggtccgtagattgacatctgctgcttcactgtcaataggtgaggacacttgtgtctacccagaagggaaagtttgatggctgcttctgaagaggcctgcctgggagtgctgcaccaagacagggcgctggactggcttcctggaaacatacgttgttgctaagtatgtctggcacagtgcgatggaagattctggggctttttcttcacttaatagttatgatctcagaaagggttggtttagtgtggaagctgtgctattaaacagctttgagctgatgtttccctgtgagcctgggtcttttccagttcatacaagtttctctggaaaaagtctgtggtcctaaaaatcactcaagtaccaagcctttaacctgtgaaaacatcacatttcataaaaatatactagaagtctcatgtccataagatattttcaagataaagtttctctgtgtagaccaggctggcctcaattcagggacctgcttgcctctgcctcccaagtgctgggattaaaggtgtgcgctaccaccatccagctattatattctttttaaagtatgacttcaactcttttatttggagagtgctttgtccccttgatctttgtcctgcattgaggagagcccaggacactgtggtgtttctgcctagccttggccacactaacttaaagtcatcatctcttcatgtatcctcagtgccggttagtacctctcttccagctttctttctgacactgatgtcccagagctgtgctggtggctaatgcttgtggtcttacactgaggaggctgaggcaggagggttgtcacaggtttgaatgatgccagctcagggtatcagaccctgtttctatgcccatatcaaaacagaatgaatatccacaacttccagccttcactcctgggaagcccttctcatctctgggctttagtccgtctcagctggtgcaagcctttgctcctgttcatcactaatgtgctgtgtcgctgtccagacattccagtatcctgtctctgtctctgtctctctctctctctctctctgtctctctctgtctctctgtctctctctgtctctctgtctctctgtctctcacacacacacacgcacacacacacacacacacacacacacacacagtctcctcggtagaggccttagcttcacatgtcctctgggccagcaccacagactctgcctctgcggcagtccctgcccccatgcactgaatgggagttttccccatagttgcattttaacttgaggaagcatcttctttttgggagttatagttttagttgcaaaaagagcagctgcaccctgattgggcgtgggggtggctgttgtccatgctgaactcaccagaacactttacagcacctggagtgtcattgctcctcctgcctagctagcaccaagctgtatagaaatttggggttggctttggctttggctttataccctttgcacctggtgcccctgctgcctggcctggaatcccctgtggacttgtcaccacaggtagccttcaggtgttaactgcacactgtccctctccctgtcaaaagaaaaaaaaactctttaattacataattgccaatgccacagacagaatatttctaccacagaaaggagtgaggcagtttttttccaagacactaagtggtctgaggcctctggctggcagctagtttaaggagggtcttttaggttaatttcatacagtctccaccttgtgactcactttaagagtgctgcatgtgagacaggatacctctgtttctggagtcagtcagcgtttcaggacgcaaagcttctaagaacctttctgacagttactctgtgatcagagttggcctttcccctcagcattctccatgtcatctgcaagttcaagtacatgtagtgggctcccaagtcactcacactgctcctgactgccttggctgacagtgtgctgaccagggcctgtgcctgagctcccgggagtagctcacggagagacggaggtggacaggccgcagaggtggagcggctgctggagaggaacacgtgaatcacagcttaggctcggtgctgttctggggacctccgagcacttgagtggggcctggggtgtagagtggggcttttctttagaagtggcttcaggtggaatccagggaaggagggcaagcatgtgacctgagactctgtctctgagcgtttgcctcctgacacacccctcggggaagtgactttagtcctctccttatccagatgttttaaatgttaagggttttcttagactaagctaatagtttgggctacagtgtttatatacctcgagttctgtcaaaagcctttacccctgttaaatatttcttttttttctagtcagttggtggtggcacgtgcctttaatctcagtacttggggggcagaggcaggcaaatttctctcttgagtttgaggccaacctggtctacaaagcgagttgcagaacagccaaggccacacagagaaagccctgtcttgaaaacaaataaaccaaccttactttcttcgtagacttcaccgatcctgtggaaagagaataaaccctccctgacccccgtcactccagctactcactggagacattttgggttggaatctgccactaagattttctttcttgaagtttcagtgaggtcactgcagattcctgtacagctgtgagatgacgcagacttctcataccctttctcctcagcctgctgcgtgtctgtgaaactgcagcagggccagagtgtgtaatgcatttgtatttgagatgatccctactgtagctcaggctatcccggaactcatgttcttccctagccttccaagggctgacatttctgttccctcgcagccgggcctggtggcacatgtctataatcccagcggcattcaggagagaggcagcagttacagactctcagctcgtcaccattctctctctgtgctgtctatcatcctgtgcatcccagtcccctgccgtcccctgggctctttctgatgtcattagaccccacacactccctgaccgagctgtgcccataaatactagctcctctgggtgtgtatcctgtataggcagcagagataaaacgcctaatagccgtgtgtgctggtccagcctggggtgaagctcactgtcatgtggcaagagcccagagtgatgtggtgcagtccctgagcatgctcgggcaggggcagtccctgggcccttggtcctgtacttgaagtttccgttgaacagctggaccatggcgtttagttagtttcctcccactgatgccagccttagtctgttgggacagagtctgtcactggccctctgtcctacagaggctacccggcagccactttcagagatagtactttttttttttaatttatctatttttatatgtaagtacactgtagctgtcttcagacactccagaagaaggagtcagatctcattacagatggttttgagccaccatgtggttgctgggatttgaacttggaaccttcggaagagcagtgagtgctcttaactgctgagccatctctccagcctgagatagtacttttgatttcactagccaatcttgataccttccctttccacatagtgaacttgtggccacaggtggtctacctcctcgctgaggacagggaccttggccaatattccacagccccacatccccacccccacacaccccgtccctcaacactcggcccaaactgaaggcagggaaggaaattggtgtcaagcttgtggtcctcatacatggttgctctagtgagcccgggggctgcaattccctgatctcagaagaagctgtgaagagggcagtgcagcacagcagggctcatagccctcgtgggaccatgctacagcactggtgttccggaattcctgtccaccctgggttttaggaggccttggttcttgataacctgtctctctgacctcttgggctttggaggaaaagtagtgtgtgcacgtcttcataggatgttcaagccacagtagctgagagggttggaagtgacctgcaggaaaagtgacaagcagtgtgcacgtgggtgtacgttcctctggaatttgggttgtggcattaaaatgtagaccaatccttaaagaagggtctagctctcaaaagcttctgcaggtgattatatgtcactagtagaggcttgctgcctgtccccactgtaaaaaaaaaaaaaaaaaaagtgtatgagtatgtgtgtatgtatgtatatattacacacacattggccctgctgcagtttcacagacacgctggctgaggagaaagggtatgaaaagtctgcgtcatctcacagctgtacaggaatctgcatattatatactatataattatgtgtacttatatatgtatgtatgttttttgagacagggtttctctgtgtaggcctggctgtcctggaactcaatctgtagaccaggctggagaaaaaatattttttgatgtattcgcctttaaaaagtcctagggtacatactatagaaggaccagagggacagatcttggaagaatcattcattttactgcacagttaggatattgtaacacagctaggaggcttgaggcttggctgtgtgctggtgttgtttgcaatagtactctggatgtagatttaactccttttgttagtttgaggcagggccttacaaggcagcccagactgagcttggtgctgggatgtgaatgtgggttgttgttgttgttgttgtgcatttgtgtgtgtatgcatgcatgtgtcacagctggggaagtcagaaggttacttgtgggagttcattcctatcttcacaatttgggttccaagaggccaactaaggttgtcagcacctttgctggctctcaccaggcttctgagtgtagctttttaattaaaggcacttagtaaaatttgtttcccttgaggctagaggtcactgtcatggtgcagggtggagggagtgcgtgtgcagttctgtgccctatgcacacatggaggccagttgaggacattgggtgacccgcttgatcactacccacctattctcttgaggcagggtccccggagtcatcctgtctcttcccagaaagggtcctgatgtcatagcacatggccataccgaccttttgtacagtgctgggatgcagctcaggtcctgtactcagccaacaattcagttaccattcggcttgaccaggctttgccactgcccggcccggcttccctcaattgtgtattgaactggaactggagcacttcgttaggcctgtggggtgtgtgtgtgtgtgtgtgtgtgtgtgtgtgtgtgtgtgtgtgnnnnnnnnnnnnnnnnnnnnccaattcaacatttaatatcttcttatatttttctataagtttctacacaaagaagcacagttgagatgaagatggggcagggccactgcctagtttcagaatttggcctggaatcattttcacttccaggacaaccatgctactctgtagatcatgaaattcttttttcttatgtagacgttaaacacagtgttttggaggcagaggcaggcagatgttccagtgagtttcaggccagccaggattacacagtgagaccctgtctcaaaactttcaatttttttctttccattaaaatttttttatgtatatgagtattttttctgcatatgtgccagtgatatgcacatgcccttggtagccagaagagggcatcagacccccttgggacctgtgagcctctgtgtgggtgctggagaccaaactacaagagtggtatttttgaccacttagctatcaccccagcctcagctctgccccacccagacacacaagacagggtctcactgtgtagaccaagcttgctgtcaacttacagagattcacctggctctgcccgtgactactgggattaaaggcaaccccatttaaattttcttgcattttaatatccctattttttttaaatctttggtttgctaaaattttgaaaagaatgaatttattccataacatacttcgtggcttggtttggttttgacacagggtcctcctgggtagctcatgaacttgacatacttctgtctccttgtaatgttgggattcttagagtgtatacatgcctgacatacagtcctgtgttctgcctagacgtgaaaggtcacctgcacttctccatgtaggctgacagctgagatctgaagagtctcttcctggtgtgggcacagtgccaggctgcgtctggatggcctgaaggaacgcctgcctgtgtggagcctcatgcctgcctgcttgcttggaatagaatagcctctcggtcccagcttgggactttattttaaagacttacttgttttatttatatgagtacactgtagctgtcttcagacacaccagaagaggataacagatcccattacagatggctgtgagccaccatgtggttgatgggaattgaactcaggacctctggagtagcagtcagtgctcttaacccctgagccatctctccagcctgtgacttcatttttgtggtttcacaaatccattccttccagtgctatcatgccttcatctctgtgcctccttcatccttggtctctcacatcaggtaggaaagcatgtggcctctagaagaaggtggccagtgagtatctcatatgcctttttcttggttctggttagcagagcctcacacagctttccagggacttgggaaaatcttgaccaacattgttgtgttttagtgagctgttttctgctcgttcacactgctaagtatgcagggagcatccatccattgcggaaggagagcactgtcacttcagatcagggatgtcactggtgtttcatgtggcctctcccttgggaccttggaaggaggaaacacagtgggcagactggttcctgccaggaaaattgtagatattgctcttgcagatgcctgccaattccttgttagtcaactgtcccactgtcccccggcaggcagccaagagccgggtgaagttcttactggcctgatagaaagcagaaggtaaacaaaacagaagtgaaagtcgatttttttagccagttctcttacgggaacagttttgtggttctcagcattttagtagacactggttccaatatgtttgattgacatcaattactgtaagtctgattcattttctccctattgatttctgcccaaggtggaattcatgacatttaacagaaaatgtaagtgatgtctttatcaagggctgtaaaaattagggtcaaagccagggacacttgcaagtctaactgcgagtgtgtcatcctagttacccgtgtaatctgtgtaaggtgagcggcagcccgacgctctggcctgccacactgaactcagaatgctgcttctaaatgcagtgtgggccagggtcacttcaccagtgtgaagccattcattcatatccacgctcccacccccagccagttcagcctctcaaagctgttattctcagtgctaaaaccacatcagtccttagggaccaaaagtcattgttaacataattatgtaagtggcttgttcttgtaaatggcttgaggtcatcagcagtgacagaggtcactttggtatttttaagggttaggtgttttgagcagctgtacaagcaggaggactgttagcagcacagtgctgaagccctggagtccactctgggagcctctccgaaactgctgcttctctgaagccatatcaccaccgcccacacccacacctctgttcctctctgtgactgcagctgcagcctgggtattttgcccctgtagttattcagtaaaccaggtgtgcttgtgcagactcccagcgcttgtctgctgggattattagttcaaggtcatcctcagcttcatagggagttggaggctagcctaggctatgtaatatgtaagtacctgtctcaaacaaaacaaagcaagatacaaagaatgaagtattgttttccattcaaagacagcctctggtgatctatctattctgattgttctttgctccacaaaatttttctttctcctttgtagttagacccggttaataaaatctgctgtgcactcaccactctgaggtgcttacacacagcatcttaggtgagccagagacaagcgtgtgtgctctcagccatggctgcgcctgggttccaggaagtgcttgcctctcagcccccactgcccggtctatctgcccttccttccttcagtctctcagctgactatctgagaatcagtattttcccacactatcaagtaacacgccagcccctcaactcagatgccatttagagaggagtcgagactggccagtgagaggaacttgctagtccccgaattctacttacatgtggggtttttgtttttcatttatcaacaacttcacacggatgtattacatatgttggtcactttgacctctcagtgctgcctggaagcccctcctcctcccagtaagacaccctcctgtttccatgttgtggggattgttttgcttttgttttttgtggtccctgaattcccagtgttgcttgcatgagcctgggtgggggctggatattggaaataacagtcagtgcggtagctgttctccattctctgcttcaggatctgttttagtaaccagtttggtattatcttgtcaggaggttgtgtgcgacaattgcagaagccaaaccaggccccaggagtgtgcgttctgcagcagttaggatgggcttgatgggtgttctcggatgcatgttccctctggggcacttccaccctgtgccgggaagcatgctgggatagagtcaaaagctgtatacttacggtattagcatcagcctttcggtcagtcgcaggttatgttgagggcctgccctggcctgggtctgagattagaaatgagggcctctctcttaatggacacctgactgctttcaggaagccatcctgctctgccctgtggcagacagttttaaacaaataatgcattcttccatggagcaagaagaagtcattcactgcatggaactaaagcagatgtgttaaagccagtgctgctgtttgacttagcaaagtattctgtgaaaatctggaggcatttctgtgtggctggactggatgttatccctgtttacttccaaaagaaatagagatctcagtcaaggcaggtcagctgctttgtcatccacgttggtatttctgactaattgcatgtgagagacacttgaatcagcttccctaaatgcaaaaatatcattctgcttatttcttgttcatttgttctgttttgagacaaggtctcattatgtagaccaggctgtcctcaaactcacagcaattcacctgcctctgctcctgactgctgagatgaaagctatgcagcctggtgccagggatcattttgattctttgaggtgggatctagctgtatagctcaggctgacctcagcctctgagtactggcatcacagatgtccatggccaccatgactggcactcggaccgtttgtgtcctctcaccatggctttaatgctagctttgtgatcagttcactttctcagttcaggtttttgtggagtcatgcagctggaggctctgaaggcctgccatgcatacctcgttctcatgcagattctgacgccctccttctcccatctcaattggaatcccctgttggctagcttcaggtcagattctcatgtcttggggagtatgctggaaggcggcttgacgctgctgtctttctcatgtcggcagaaggaagcgtacagtcaggctgtgctgcccttccaccgtgaactgcctctcaggctctggggctacacagtccagagaaggggttgtttctctgcttctcatgggcacttggtgggactttctattgtctcagtacctgtagtttactatattttactttagctgatttttttttttttttttttttgagtcaggtttctctgtgcagccctggctgtcctggaactcactctgtagaccaggctggcctggaactcagaaatccacctgcctctgcctcccaagtgctgggattaaaggtgtgcgccactactgcccagctttttgttttgttttgttttttgtttttggctttcctttggggtggctggtgtgtgtgtgtgtgtgtgtgtgtgtgtgtgtgtgtgtgtgtgtgtgtgtatgtaaggagttctttatcttttcacctgagcttgtcatttttgctattttgttttacattacaaaagacatttttgtttagtttgtcatagcatcctgttcttacttgctaataaatatgagatcttgagatgtgagtgtattagtagtatttattctcagtttttctgaactccacagtttgtccaccgagggcttcttttccctgttagacactttctgtgtatatctgccatcagtggcatctgtgtctggagagtagaggccctcaggcagatggagcactgagcaaatgggcacgccctggtcctggcctttggtgcttcctgctgtctggtcagatcatctgaagacttccgcctagaatggaagtggtgctacagcacactctgtgtgagcttctgagatgaaggaaggcagggcctgagcttgggctctacagcttattccggcatggatgggccgtccaccttgcacgtgctatactctagctagtctagaggcctggccaactcttgtagaaaatcaaagtcaccctgtgatttcagcacaagtaagagcaggcccagcagcccagagggacggctctaggaggggatggctgctctgctcagaggaggctcagcccctgccccactgtcagtctcacgctttcttccgaggtgacagctgcccacactctgcatgtctctggggtctgatttctagatagactgttgtcgccatggcccccttttctgtccccttttttactccaaccccagagtcaagagtttaaaccacttgtagacatacagtttcatggtggcagtctattcacagtgtgcttgtgcttgtcgtagctaatgaaggagcagattgctgagggaggttgtgggatgggggcttgaggggtaaccaggaagtgggatatcatttgagatttaaacaaatggaatgattaattttttaaaatttaaaaagaatgtaagaaaaaaagagcagattgctcccagacagcatcctgagactggtgacagcccagcaagaacagggtgagcctatgtggtgcttctgttcacgcagggatgggtgtttgcctgcaggacggcacttgggtggtggagtgtttattgacatgttcctttccatggctgttccaactctcaggtctgacattccagcacttcaagatctggcctgtctacccgctcccacagccatctgctgttcttccctgccacccactcactcattcacataagcctgacacaaacccctgcttccactagtgggccttcccaagtagtccttgtatgtacctgtgcataccaccttgtcctccccacacttctctgccttcggtacttgccatcatctctggtgctccactgaagatctgaatacgttcctgccatagattccaaaagagaactctttattcttctttgtaggacattcgacatgaagccagcgacttcccatgcaaagtcgcgaagcttcctaagaacaaaaaccggaacaggtaccgagatgtcagcccttgtaagtacccactgttccaactgccccacttacacttcccagcggcagcctgtcgttgtccagggctgggtagagtcctgacctcatggtctccatcataagcacaggagacactgtcatagctcactttcactgttgcagaaggcactaaagctccagtttctggaaacggtggtggctcagggtccttccttttagctctgtgttgtggtgagtcactttcctccctcgaagtggcctgacatgggcttagtggacagcctcttctgcatgactcggcagcaatggtattcacaggtactcacgccattccgccagatgtgtagagccagcctgcccttggctttcagtgcttaggactggcagtgcccactggtctaataagcctatgccttctaactggcttatagtctagaaacacattcagagtgagtaagtggacgtgtagaaagcgtggaaagcaagaaaagccagaactgggcctcaggacctgggtctatcgttagttcccaggtgtattgactcccctcaaggtctgtggacgttactcctcaacagggttgtggctacttagatctgcatggctgccgatctggttcctaggctctaaaatggcgctaggattagaacacagcctgtgccatgctggtggctctggctgacaggatatgggagtcacactccacttataggagtgtgtggagctgaagccaagtgctccctcgggtatgcgtttgataaaggaaggtcgaggtctgagaccgtgttaggaggccatttgaagtgtccttgaggtcctcaagtgaagggtggctgacctcaccccagcacctgctgttttcatcttagctggccttggctgagggcatcgggcctgattgtgatagcaaaggagcatagggaacccccgtgtggattctgcttgggagccctggctggagcttaaggacagcactgtgaccgaccgcatgaaactctgcctcttccccactgcctggggccccaagacatccaccagctctcctggatgggggcagacagttgcagtgtccctaggctggactcaaacttactaagacaccaaagttggccccaggagggtgtggcctggggctgatgctggtgctatagaatgtggtatttctgtgttcagggctgaccccacaggtgactgatgtcatcctaacagtgaggccccagcagtgtgcatgcccctgggtccctctctctgctttcctgtagaatataggtcttggctctcacggttaacctagctctgcttttctttcagttgaccacagtcggattaaattgcaccaggaagataatgactatatcaatgccagcttgataaaaatggaagaagcccagaggagctatattctcacccaggtaacaggctgtctgtctaaacgattttttcatgtcacctgaagaacttgagagctgttgtgttcacatcagataggatcatcgtgtccgtgagaagtttaggcttctcatcagtcagcacaggagcaagaaaggcaacaccctacttcagactctgagcacagcactgtgagacgacacactgagctgccagtggtctcttgatgggcaggagaagaccctagacattgggtccacagaggcatgagcctcagcatcgaatgcttctggcagcgactaagagggctagctagtccttggttgtctaggcacctctgtcccaagggctattcagtgttcctctgggccttgttagaagatgacttaaaaatcccacagctctgggcttccttctgagaaagtgtgatagacgtcctgtaacacactccacagtgtgtgccagaaggctgtggatgtctgggaagaggataaaagcttattttcagtaatgttctagtcttagcctgtggcctgcaatgcggtctccgtggccctgtgttgttttcctgttctccctttgggatcccatatcacacggcgtgggctgtagggagtttgaacgtgacgtttttgcctgcttttggaaatcaagtcctaatgaggccagagatcggatctggcactcctccgtcacagacagcccttctcccttttgtcctaagtcagtttgcgtgacaagaagcagcccagaagcccccagtcagtgtgtacagtatcagtggctgcttgcggtcctgtggatgcagggccaacctccctaggtctcagccagggtcctctcagcacctttgtgttttcctgggcagctgcaggttccttaggcgggtggggcctccttctgagaagctgaggtacagtaaccttgagattctgtgcagagaagttagcattcttggcttcaaccgttcatctgtagctgtgctcagagagacttgatatggctcttgtcccattgtagggtatgtgatgccaaatgagtcagatgagcagttagcattgccattgaggagatggggttggatggagcttagtgacagagcacttgccagtcacgcaaggttctgggtccagtccccagtatttcaaacaaacaaacaaacaaaaacagtgctaactgagaaatagagaaactaaagcattactctacccactacctgaccctgggccctggccattttgtgagacctgtgatactctgctgtgtacggctgtaccatgagcattcataagtggcttctacatccgtgttccagacaagaatgcaaacagtctgaccccaaaggagcgtctccgacagggagacccggactatttccacgccacaaataaagaactcttcatttcattcagtattgttcgttatagaaaccacatcgtagcctcatcttgtacaaattggaggctgggaagagtggaggatgtagggctgtacttcacctccatcacaaagcatagccaggtcactgtgagctgggtggtacttgggagcagggatgtgactagtaagttacagaacacggagagctgcatccatgggggggttgagagtttggatccttgtgtagcacagaggatgaaggacccgggtggccatcaggtacctggtgtcctgctgcacaaagctagctctcttacctgagggagagtcacctgtgtgatgcttttgttagagcccttgcctcacacttgcagaccacactcagggaagaatgagaagatgccaagtgctggcacaaggaagggagtgtgctgagatctaagggcaatggcttggagggaaataggggagaatggagacttcccacccaaagatgtaactagccctggtatggatgttctcctgtagcatgtcataaggctcacaattaaagcactcccagcacttgacagtcatccatcagcacccaccatcactaggtaggttttctgctctgcaggcaccggtcatacccaggtcttaagagccccttcgctacctctgagaccatttgtgggccacgtctcttgcacgttccttggtccagctctaagggctgtccacacttagactcgccagtactagtaagaagagaggctcattctgtactgggtgcttgttccattctcggtgctatgctgagtccttcacatacagcaccactgttatttatgcagccttgagaacgggtgctgttttttaatcaagtgggctatgtgtaaagaaagctcagagagatggagtgacttgcctaaagttagacggtgacagattttaaaagcagggtctagggccagagcacagtgttggtcctgcccgtgctgcctctcgcccacataggagctgtgtcctggactcatctgctcctagacgagaagcctagtaaagcccctcggccgtcagcttagatccagggacagcctgcaccgaggtgcggaaatgatccttcagcacatgatgggatgtgggactgggtgactgacggtggggcacgcagccttggtgggctactctgcctacacctatgaacattgtcactgactgactgtgtggtgtgcttgtgtgtccagtgttgtacagtgtgtatcttgtgtgtttacagggccctttaccaaacacatgtgggcacttctgggagatggtgtgggagcagaagagcaggggcgtggtcatgctcaaccgcatcatggagaaaggctcggtaagttctcgccagagatccttgctgctgccatctacatacacccagttcttaaagctcccctgagtttccgttgtgagtttccattgtctaactcctttacacggcacaatgtgtgtaaaagcattacataaatacacttttattacagaccacactagggagaaagagatgccccaggccaggctcttgctgcctctgttttcttggtactgcctgtgtttgtggaactgggtaaacagttgtttttttttttttctaaaagcagcctttggtgtatcttaaccaagcccacctttgactggtcagactgtgcctctcgatggcagaggtaatcctacagagctgggggagacattggtggtgagatgactttgggacttgtgttcaggctctgtcctttcagccacccttgcctctcagcctgatgtttctgtccaaggtggtctgtgtcactcaagtcttaccacagcctcacctctaagggtagtcattgatagggcctgagactctgagtggctggacctagacctgtctctcactcctcaaactgtatcctggataggcctccttttgtctccttcctgtcatttgggccagagatctgagtcatggtgacactctttcagatttaggcttcatcaaacagccagccttcctgtcccttccctcttattcctgtggtgacactgaagattggttctcagtgctgcccatgactagcatgggcagagccagcagtctcttccctctgcacttggttggcacttacagcctccccagctgcagaggctgaagcccctggaaaagctcagctgaggatcgttgggagtaacagcagccatagccaggagtggagaacaggatgttccgttcagcctggccaggtgtagatgttgtgctgtctgctgctcagctgggacagctgcctgccctgctttccttgtgctctcaagaacatgaggtttccagagaaggcatccatcaattccagagacagtggccagtcacacacatccgagtgaggaaaggtatcccccgcaagctgcacccacccgcagagcgcatgggcccgggcactcctgctagtttccttgaggctgcttgatgtcatattgttgcctgatttccactttccacttctgtagaacatggtagtagcaggtacagagcctgccggtgtggtcagttgacaaaaccagaaagtagaattttaaatcaccctactactaagaaatcatcttgagctggagagatggctcagcgggtaagagcactgactgctcttccagaggtcctgagttcaaatcccagcaaccacatgatggctcatagccatctataatgggatctgatgccctcttctggtgtgtctgaagatagagccctcatgtatattaaataaataaacaagaaatcatcagatatgaggaaagagataactcagtggctaagagtgtttattgctcttgcaaagaacctaaattccattcccacacaaaggctcatagccccctataattcacgttccaagggatcgagcaacctcagtggacaccaggcatgcacatggtacacagatatatgtgcagacagaacacccatacacataaaaaaagtcaccgggtgtggtatggtttagtgtgtgtgtgtgtgtgtgtataaggatacacgtacatgtgtatacttaaatatgtaagtggtcctgatggccagggtcctgatggccccttgtagttagcacagtttggattagtaggtattgtcacactgtaaggaatggtgcctactctgttgttgcgtgagtaccaccgggtctggcttttggtaccctgggctgatcataaatagatccactatggccaccttggtgaggagtcctgtgttccattggaagcagagccagtgggctggttactttctcatggcagtggtcctctggcactattctccactcagggctgtcccaggatctcctgagactgcctggctctttgttttggaaggacgtgtgtacatcatggttgaaatggctattaaactcagaaggccagcacactggcattgccatcttctgtctgagactggccaaagggccttggtgtcagtcccagccggcagggcctgctcatattccagtaagagttagacttccgctcagggccgtgtgggtgccatcaactgactggaagcaggcgttatgtgctctcttgtttgttttgtgtttaaagcagaaatttttacgggaactgacagagccaagcatggtcctatagacatctaattaaatgttgtttgatggacatttggctgtgtgccagaatgcctctgaaattgtacattttgcctagatgagagatctgtcaggcttgttctaggcttctgctgtggaagtgaaggtcagagcctgtctaccctgtccctgaggcaagaacccccattccctcttctgaactgacagccctgtggcattcccccagctcatggtgaatgcccaccctggcatgtagcctcgggtcttactgggaatgagtgacccattcaagtctctccatgcaacgttcactggcatattgcctctgcgttctgatgtagagacctgctcccatgctcacagatcggccctactcggggagctcctctctggcagctggtccttaaaggtaggaggaggcttgggttgagcaggccaagaccttgaaatggctcttgagaaagcccacgtagcttctgtcctgggattagaaggttcctgctccttgggtagggaaagctcttgcctccttcgctgctttctgtcttttgcattggttttgtggagagcggctttggagcccagaagagtaacagcaacagcctttgcaattctgtcttcggcctcagtccctcctagcccctcatgaggtgacatctcaggtccccggttgccacagccccaccatgctctggccatccttgccctgtctcctactttcccttgagacactgtcctgtcaaaatgttctctccagagagcttccgttgacctctttgcttggttagcttgagcttctccctccactgagtccccaggttgtatgtcttctcagtgtctcccctctgtgttctccccatccacccaccctagagggcaggagctcccagtagtctgggccagccctggaacaggtcaggcaggtgaattctgtgtgttgtataccagagagtagcttacttcacttccccgggaggatgaaggtctctgagtctctgccttggagacccagaacagctctctgcagcaggaagggtacctgagctcacaggacctgtgtgactgaatcccagcctgatcttttttcctaaatccagcccagatattttggttcatcaaaagctataatgagtatttgaatccagatcatcagtggtgtttgatattagcaaaatagaactccgggaactgaactgaaccaaatcagaatgctccaatgagctgcacctgcgtgctgtcttccacggccctcagcctgacagggctctagcctcccgccctgttgcccgtgtgttcctcagggggctctgggcatcctgagatcctactgaaggcatctgtgagggacactgcttctgtgtagtgtggtttttacctcgcagcaaggaccagagcccactgtgacacgttgctgggtgagaagtgtaaaccctgccccaaagctacagggatcagggttccagccagctctagttttcctagggtgaaagctgtagtgtccgggagacccccacctgggagttgtcagaaagctagaagacagccttgccttgcaagcctcctgtctcatgtagcaggtgctcagagtaaccagagctcttcttcccccagttaaaatgtgcccagtattggccacagcaagaagaaaaggagatggtctttgatgacacaggtttgaagttgacactaatctctgaagatgtcaagtcatattacacagtacgacagttggagttggaaaacctgactgtaagtatggcaggggggaagttcctctggagactgtgacttgcttctgatcttagtccttgggtgccaatttcagctgtggcattcccgggaattatgagtcttgtgcacagtatggcttcattccatggtgaacagaactagctgttgtaggaggcagtgcccaggcaccagtgaaagacaggttacacgcacctcccatggctctcacccttgacaccacgtaacacagttccaagggaaaagtccctttcttagctgagagtgctttgctctgcctgtgggacttggtgactgaagtggtgcctgcaagagaactgacagagcttgcagcttcctcactgtctggactgctgcaaggaggggggctcccctccctgcccaggggtcctgcagctgaggactggaagccaggccttgggtaaacttgttgtggggacagccgtcttgtctgctgctcactgcactaagaggaggaggagcagtgggagctgcccacggcacagagctgtgaccaaggccatatgagtcccggcatggtggaagccactgttgacccactctgcccactgctgggattgggccaagggacagctctccgtgtctttgtttgttctactttgagactagggtagttctgcgaggtcctggtgagaggtaggaggtgtgtggggtcctgagcagggggagatagggagtcctcctggactgaggctttctaggcctaggaaagggttgggtctgtgcaggggacagtcccatatccttgggcctccctagggctccctccttgtagtgaactaattctagaattttctcaggttgctggaagcatggcagggcctcctagaggagcctgggacgagctccctgaagctctgggttcaccgcggctggcggctggcttggcaggggtgtggtaggcgcttcctatgctttccagtatttgccagcctggctttaaaagtgatgtcagataatctctggaaaacgcctgcttgggggggggggggcaattcagagcagcaccagagacttgtctgtttgaggacaggggagcttaggccttgtttggggttgggacttttggaggaagttgtttgtattaagataaggtctcactgatagcccaggctgccttcatatttacagtcctctgcctccagaatgctgggattgtaggcacaaggccagctcaaggtttaacttgagcacctttctgggccctagaacagagtccttgtagagggatgggaggcaggaggaatgtggtaagaggaccccatgctctttgggggttaaaataaaactcttcttgcctactttactctaaaccagttttaaagtgtatttgaggtacctcctgccttgcacccagtacaagtagtgtttggttttgcagtgaggtgggcagagcagctgcagggtctcacatacaacatcctggatctagtggccatactgaagggggtggccatgtctttgatgtgtgtttgtctcacagcagggaccgcctgtacttcgcagaaagatagcagcttgtatcagcaagtcaagccgtaggtgtctgtgtcccagtctttgtctggcacaggctgctggccctctctgcagccctgggggccctgacctctgaggtctggaccatggagctggtgagatagcttatacataaaggttttttaaaataccagaccatctaggaaagagcagtagagaaacagcaccagaggccattctttttgctcagtcaggggcactgtgggacagctatggaaatgggtgtggtccatgaggtgaatggtggtgtggaaaactcaccatcagcctggcctctggagtctcagctgatgtagcacctgggtggcagccaccttattggcaatcttgtctttggagacttttcttgaaaagtaacacttgtcggatccgtcccggtgttctccctgatccacccagacctggtctcccaacacacacacacataaacacaggaagcctttctgatatctaaggggccagtgacatcatggtgactttccagctgaaatgattgtggccacatgtgtgagtacagaaggaacagaaaggaagaggattgtgcactgcttaaggctgtggccagatccagctggatgcactgaggagggctgggcaggaagtgacttggtgcacacatggggtctgtgtggataatgtgcccagcctaacagcaagtgtctctttcagaccaaggagactcgagagatcctgcatttccactacaccacatggcctgactttggagtccccgagtcaccggcttctttcctcaatttccttttcaaagtccgagagtcaggctcactcagcctggagcatggccccattgtggtccactgcagcgccggcatcgggaggtcagggaccttctgtctggctgacacctgcctcttactggtgaggagggcttcgcaagcctagggagaaaggaagcacgcttgaacccaccctgttggctagcatccctgtcattgtccaccagcctccttccttggaggacacccaaggattgatgatggttgagccccttctagctttgttcatggggttcttctagttgtcacaagagcaggtgactctagaacacccacggggtaccctggaacacccatggggtatgctagaacacccatgagacaccctagaacacccatggggtacgctaagacatccacggggtaccctagaacacccttggggcaccctagatcacccatgagtcttttttctaagctctttccactcaggcccaaccggtcccaagtttgctgcatttttgtaccatttccttgagaccctctactacatacccctctgtggctttcctctggttgacccagtgtccctggcttgcagatggacaagaggaaagacccatcttccgtggacatcaagaaagtactgctggagatgcgcaggttccgcatggggctcatccagactgccgaccagctgcgcttctcctacctggctgtcatcgagggcgccaagttcatcatgggcgactcgtcagtgcaggttagtgccactctgcttcaagaatacatgttggtgttcagctctgttcctagctgaggatagaccacagagcctgtgtttgctcaccaagactctactctgtgaaagaaactcaaattgtttaaggtccaatactgttgaggtcaaaggcaatggctccgcttagtatatgacattgctacagtcattaaacaactgctcactctgcccgccgcatgctctacagagccctgagaggaagcgtaggcctgacctcagaagtccagggtctgcctggcgacctgagaccctacctccaaatttaccttccaaatatttgcctggacccaggagcccagagctgctgctgagcagtcagccgctcactaggacagacccagaacaggcaccaatggagcctctgttgctctcctctaaggatcagtggaaggagctctcccgggaggatctagaccttccacccgagcacgtgcccccacctccccggccacccaaacgcacactggagcctcacaacgggaagtgcaaggagctcttctccagccaccagtgggtgagcgaggagacctgtggggatgaagacagcctggccagagaggaaggcagagcccagtcaagtgccatgcacagcgtgagcaggtgatgggggcctggcttggggttgggggtggggtgagaggaagtggcttgctgtccagaaacacatgaaggcattgaaaactttgaggtgcttctgcgtgcatgagcaatggtgttgccgctccccggccaagcccccactgccctggatgttcctgtgaaatgacagttccagtgggtttccagtgctccttgtggtgtgtgatgtgctcagcgccaacagggatggcagcttgctcactcaccctgctacaagcattgttgagcccctactgatatctgtggaatacttaggtaatactagaatgtgcccagaatctgtgccgcagaccctccgtgtggggaaaggacaagcaccgagtggtagaaccgggatgataaagaaaggatgtgcctgcaggaagtggcactgtggtgaccccagtaggagtgagccatttcctgcgtcggccgcctccttcctggagggcagttttgaggtgtgggcacacagtctaactctcagcagtacccaccagagctttgcacacagcgtgtagagccgtagcctggctgccctcattctagcatgcgtggacagaaggtacagagccggcagtgcacgggaagccatgtgtctcctgcagctgggatgtgggtctgagtgcatgtttgcctcgagccgggacttcccattcctggtaaagcatgtgtacactggtgggctgcagactgacttgaattaaacccagccctggccatggctactgcccaaggtcctccagggctggaagacaagcagggtgctctgtgctcggtggggagggttcatttctccaggtttcctccatagagatggtctccttttccatctactcagggtaggtaaccaacctgtctcttcctctctcctcagcatgagtccagacactgaagttaggagacggatggtgggtggaggtcttcaaagtgctcaggcgtctgtccccaccgaggaagagctgtcctccactgaggaggaacacaaggcacattggccaagtcactggaagcccttcctggtcaatgtgtgcatggccacgctcctggccaccggcgcgtacttgtgctaccgggtgtgttttcactgacagactgggaggcactgccactgcccagcttaggatgcggtctgcggcgtctgacctggtgtagagggaacaacaactcgcaagcctgctctggaactggaagggccagccccaggagggtattagtgcactgggctttgaaggagcccctggtcccacgaacagagtctaatctcagggccttaacctgttcaggagaagtagaggaaatgccaaatactcttcttgctctcacctcactcctcccctttctctgattcatttgtttttggaaaaaaaaaaaaaaagaattacaacacattgttgtttttaacatttataaaggcaggtttttgttatttctggagaaaaaaaaaagatgctaggcactggtgagcttctctcgtgccctttggcatgtgatcagattcatgatttctattgatttccagtggaaggatcccgctgggcaggactgtaaagttcctgctggcgtgggcagcccccactgtgcacccggagcttgcaggtgccctggagccccatcctgttgtgaggagggcagccacatgggctgcctctgaacagcaagcccggctctgcttcgctcaggtgtcccccccgcggttccatccttctcggtctcctccctctttgtgagtgccatcttgcaaatggcccagcccttgccaccctatccctgtaaatccctgagggccttgcctcggggtcagaggtggctgccagcctaagtgctggggtttccatttcatttggaaagtcattactactctgtgtggaagccactctactgaggtgcaagcaagactggtgaaggagaaaggagccctggtgtcatggaagcccctcggcaggacctgtacccccctctgaaacactgttccagtgaacgctctcgaaggcatcagatagaggatttttgcagactgcaaagacttcctgagtggtgattttcagagtctggactcaaaaaacaccatggagcgcttaccgcgctgccttccatgctggtatggctgaggccgtggggaggccggcgctgtggctccatccagtgcggatgcctttgtgcaatcgctgcccagcagcagagcctgcatgccagcctctgcgctgcaggccacaatggccatggcggcccaaagagtgagctgcgatggaggcttatcacatggagctgccttttcaggctatgcatctcccttcctgctttaccctctgcttccttcccgagtagcaagcccaccatcatgaggagtgcaagggaggggcaggcattagagcggggtgcggctttcaggggtgaggccacctccgaggctgccctcctcttatttattcactttgcccggaggtggcccccgcgtgagcatgccctgaaactgaccgtgtctgcctgcacccatgaccgtcaggtcagtcctggggttgaggcatgagtgcaggactgacaggagccacagtatggccagtgctggggccaggagcaggagcaggagggtgtgaagagcagccttcaggagcataggacagtggtaatgcgcagagcccctgtggctgctcctgcgacgtgcagggtggaggctgggctttctgcccacgaccttctagatcccattcccggcctctgctttccctgtgagttagaagatacacagttctgtgctggtggcaccttgtgcttgacatgggaaacttagaagcctgctcactgacaggcacctcccgtgctctgaccggaagtggccgtcgctgagtaaccaccgccactcagtgagagcagtgctgtccagtcaggtgccacctgactcctggcaggacacttcaggcttccgtcctgccactccacgccacgccacgccatgccccgctggatctcagacattccacactcacacctcattccctggacacttaggcaagcagggttcttccacctcttggatcagcccctccattccaagttcatgctgtcctggagcaggccaggactggaagcaaggcagcttgtgagaagcaacctcctgggaacagtatggatgacagccttagagtcggcctgctgtcattgctggccccagggccccttacccagaagtgtgcagctctccggcctgggagagacggatgacggtgctcatgactcttctgggaggggaagaaccgagccttcacattgggtggctttttaaaataagcgaaggcagctggaactccgctgcctcgtgccagcatttcacattttgccttttacccagagaagccagcacagagccactggggaacagtgatagccttgcctgcagagcctgaggaggtggcacagccagggtccaggctgggagcagttagcagtgggctgtgtctggagtagtgtggtgtgtacagtagccttagaggtggctctcccggagaacaggcgctctctgccctgtcgcccctgttggaggtagcaagctgctgtatgccttaagtcaacatttactcagcagggctctgtctctctctctctttgtctttctctctctctctctgtctctctctctctctaaatggccatagaataaaccatttttacaaaaataaaaaccaacaaaaaactgtgccctggaagagtacctttgcaggagtgtggggtgtctcagggtcttctgtgacctcacagagctgtctgactgcaccatttccaacttgctgtctcactaatgggtctgcattagttgcaacaataaatgtttttaaagaacacaggcgtgatgtgcttgccttttctttattgatggagccgggccagcatgaggcaggcacttgccctacctatagggttagtgtgctgtgggttgtatgttgtgtgtagcctgcctttgctgcaaagatgtgggttctctatagtgtcctttcaggaactccccctttggcaacctggataccttgagactcacaggtcattggaatcccctgttccaaccatcaaaccacccttggccggctgcctgatggacaccatggtcctcacgtctcaggacatccataaatctcatctgatatatgagacccaaaagtagtgtgccttccattcgtgtaccagactgaatatgtaaggccccatggtgactgacaaggagacttgtgcagtgatagatgtcactgcagaaagcacagccccggacccctcaggttcacaattggcttgtgcagcaagtggtccccgctggtggccctggccacagacctgtcaagtgctgtgtccactcaactgaaatcttcaggtaaaaaaatgaattctcacaagaacattagtgtgagaaggtgactgttatgtaactttggttacataaccagtggggtgaaggcttgacaaaagcctggggtgtccccaaagtgccaccaggaaggcagcctaccatgagtctgataatcaaatatagggagaatgtcctggggtcctgcagagagccctgtggccctggccacccctcccatgttatagctctacggacacaacattatctacttcaggcagtaaggtggccatacgctacagggcttttaattgagatttcaggaaatggacatgaaggaaacaaataaataccaagtgagcacgcatggtccacgggactccgagtggggtgaccgagtcagccctgagagccccgagcttggagtgctctatccacttaggtaggaaacccatcgtgcgtctccatagccgccgcagggaaaacctcgcctccactcacgctggagtatccctccaatggccggagggtgccatgcactggaggtgggcctgccatgccttatcagaccagttctgtcccagctgcgggtgtgcagggagctcggactccgtgcgtgtctgtcctggagcctcaccttgccccggccccttgatcctcaggcagtgtaggctgccctggcactgaaccccaggaaagcagaagcggcgtctgtaggaggccacagcctcggggggcccccacacaccacttccacctgctctgtgaagacaccactctcctccctgggctgggcaccaaccccaagctcaggtaactatcctgaccggcccaggcttgcaagggagtggctagactgctccatccaaatcctgggcactgtggaggctaagcagcctcaaggaagagagacgcccgatttgagctcgttgatcacggcatcttaaaaaattgtgatttcaacgtccgcttcctgacagaaggcctcttgttccgagtggagtttgtccatcttctcgaaagccaggcggcctttctcacctggaacacagaggtgtgtgtcactcgctaccttgtcaccaacttggtgtctctagagagtcccctgccctgtctgagcaataacagcctcttgtgctggacatctgggcactatagctttgcccctgccctccatttgccaagggccataaagtaagtacaaaaaagttataccctggctgccagcctgctgtgaaggtagccagccctggccaggggctgctaagcatagggtggcctatagcagggtccctggcagccccgtactgacagctgaggtagtcttcccccatctccactagaactctaggaccccactgtgccgcacaggcccttgggctgcactttaccaaatgacagtgtcgcttcccgcgctgcaactcgcacggcctccaggtcagactgacacagactgacaatctgctcacagctttcaataccctgttaggtcaggagaaaggaggcttcagcaacctcattgtcatccctgcggtgccaaacccagcgtggctcccaggtcttcctctgtcctcagaggactccgggccctgcagtgcttttggaaatcccttccacaccccagtgcaggcctgcaagcaaggccaccaacagcttgtctggggacatcatctaacaaacccagctgccttctgggacttgctacctgcaactctcctctgcctggagaaccagggtctaattgccacacttggggctcccatgagaccttcgactccttcacccagcacctgagcctcagcaggcacctccggggaccttttgggacagccctgagcaagtgatgttggtgggtttcttctacattgagtcagctcccatgcacaagtgggtaacaaggttatatgatgcagacagattcccagcgtaggagtgcaggggagagagtgcaggggagggagaggggaaggcagggctcacaggccctgaagcccctgtgtcatccagtccagaacgatgagctggaacccagaatagctttttacaaacctattcacatcgtgaattctcagaatggcttttaggcttctttgagatagggtctcaccatttggcccaggctggcctggatcacaggtatgtgggtgccaccacacctggatttttttttttaatgcatgaaagctacatatatttatgtgtgactctgaagagattacacatgagcaccacacacacacctccacacacagtgaacaaaaccagagtgaacaggtgccatctgcgctgtgttttgagacaaggtctctcctaggctggagctcacaaataagacaaataagactagctggccagtgagccccgaggatctcctgctgccccctctactggaattgcagtatgtgccttcacgcttggccttttttttttttttttaattgagttcgggggattccactcggtccctcgtgcttgtaggcacatagtccttgactcactttaaagtcatgtttaataccaacgttcagtaggcacacatccctgcaagcaagaagaaaatgtgccaaaagtggccactgctgccaaagaccaagttgatagacagcttttacatctccatgttttatcttcttctcacaagaatttgtcatagttcaaacacgtccaactgggcagaaagtgccttggtgtggagacctctgctgttggagtctgagagctggctgttactagtagtcctcttgctgttggggaaaccctcttacagccccaccttcccatcccttgtcccagtgaaagcatttcaaactattgccaccgtggctgctgttggtgtttttggccctcaacactggtggcctcctgtcacccatgaggacaagggactcaccccaagctgctgcagagccacgcacgccgcctgctggaccttggcgtcactgtcatttaaggcattagtgtagtacagcagagcctgagaaaagaaaccaggattggactgcgtccgcagggcaagcccgggcccccagctgggtcatgcacactgcaaacattccagtgacccagactcagcccgtctccaaacaaaacttgggagtgagacctgtcaatctggccaactgtattgtcaggtggatgaccccaaaattgatcaccttttcccggaagcgcttgttcctggccgcgctggctaggcgcgttctggccgccctgcacagcctcgggggtccatctagctgcagaagtgcccaggcttgaagtgtctggggcagtggctgcagctggcttagacacttcccatgcagctttctcagggccttggctgggcctgcacagctcaactcctcaatgagagtcactggaagacaggaagaggcaggtgccattgggcaaggcttagccacattagtcacagaggagactccaaggcagggaggggcaccgctccctaaagatgagcagaaccacaggccagccgcggcccagtggtacacacctgaaatcccagcactcgggaggctgaggcatgcgcgtggtgatttgaagtcagtctaggctacaccatgagaccctgacccaaaaagaaaccagaataagcctaaatttccaggatgcctcctctccctggagctggtctggactgtccacctccctctctcaagttccaccatagctggctatggtctcactccatctcagttttgacagctagagggagagttacagaggctctgaacagtggggagccagaagggaccagagtgtgctgtaactcgcttctaggccatagctaccactaggccctaccttccttggtgagctgagcgagatgtttctccaagtcggagatgctctgccgctgcaggtagctgtggaactggaaccaggtgaccacctgctcttcctgaagccctgccgggaccaacagcccaccacagcccaccacttgctccaggagcctgcgacacactggcagagggaagggccatgagcagagctgaggcctcagctggcctctcaatctatgtcagctgaaagggactctgggaaaggggagcccccttacagtcagcagactcctgattctaggacctcctctgccccagaagttagtagcacttgccagtaaggtttgcctcagctccagcccttttcctgtcttttagttatttgacagagaaaaagaacacaccagctagccagtaatcaccagtagtgggctggatcccagcaccagagccctgcaacaagctgcccagagagtggaaggaacttccagacttcagatgccacacccccccccctggggacaaccttcacttgttccacaggaaatgctacagctgccttcaggaagtatccagcctgatatcaggacacctggatggcacatgcctgcacacctccctctaagaacccttgaaggcttggtggaaggcacagggatacagggcctgctttcctaggggtggggcagcaaagacatgcacagagctaggaccccagctacatcactgccgtaccccctgggacagggcaagcaaggatgaccctacctatttccagctggccagggtacttccctcggacgcgatgcaggaatgtcttcttgagctggctcaggagtgtggaggcagggcaggccaggacaccaccaggctgcgtgcacccctgccacagtgccaggccacccttcctgtgagaagcctgtgggatgactaagagccagcagctgctcagcagcctgggcaggagcaccagaaacctctccacaaggacccaaggttggaaatgagggcaggagacccagtacagggacctcctctcaggcccctgtcaccccaaaggaacagtcttggctccaagcactttcctagtccctactcacaagatcagccatgcactgctgccctgtctaggaaactggactccccagacaagtgcacagggggagacaaagaacggaggtgacagccattccttggaggggacaccagcatgtgggtgggactggcttcagtgaaccagcagtggccctggcagtattcatggacaaaccaatgtgcaagctgtaacctacctgtcaatgggagaaggaggaagggagggaaggaaggagggaagaagggagagannnnnnnnnnnnnnnnnnnnnnnnnnnnnnnnnnnnnnnnnnnnnnnnnnnnnnnnnnnnnnnnnnnnnnnnnnnnnnnnnnnnnnnnnnnnnnnnnnnnnnnnnnnnnnnnnnnnnnnnnnnnnnnnnnnnnnnnnnnnnnnnnnnnnnnnnnnnnnnnnnnnnnnnnnnnnnnnnnnnnnnnnnnnnnnnnnnnnnnnnnnnnnnnnnnnnnnnnnnnnnnnnnnnnnnnnnnnnnnnnnnnnnnnnnnnnnnnnnnnnnnnnnnnnnnnnnnnnnnnnnnnnnnnnnnnnnnnnnnnnnnnnnnnnnnnnnnnnnnnnnnnnnnnnnnnnnnnnnnnnnnnnnnnnnnnnnnnnnnnnnnnnnnnnnnnnnnnnnncggcaggaagcccaccttggatactttgtgaggttgagccagtttgaactggtgcagtacctacgtgtgtacatcagaactacccgcttgggccaggacttggctctctgagacccatgcggttcctcacctcctgccccagagtctccatggccctcagggtgggctcctcttacctgacccaggcttgtcactgcctgtgaccccagtccccaccctggccaggtcccacccagacacctgaagcaaggctttgcagacttgaaggtggacagtgagcagcgtgtccagctcgggggcaccagctgtgagctcgctgggtgacaccttcagtgatggccgtggaggcggggggctgtccctcctgagaagacaaaagagctgagtgaccattagatttgcaaagggacaccttccctgacacctcctcccaccccagctccagatcagagacagggcttctcaatagaggcatggatgggtgagagaacggcctggctatcaaacagatgtgcagggctgggcttcctgggagacctgaggctatgactccctctgggtggttaccagagcctcactttgctcttctgtgaagtgggcatgaacactagacctagggttagtatcatggttcacagggcagagctgagcccccaccaaagcccagctggctcaccacactcgggaaggtagcacgcttggaatctccctgtgggatcacactggcttagaggatggagactgaccctttggtaatgccgaggtctggggattagaagtggccctgatcgaggtaggtggtaagacagagatggatggtggtccagagggagtggtgggcaaggcaggtactatggaggttagtcagcatgacagccactgaagtcaaggtcagagtttggctgtgtgctgctgttattgcctgagaaaccctcagtgaccataaagatttgccatggagagaaagcgccatgcacggtgaaactacacaagatggggccaaggactcagactagcatggagctatagcagtccagaggtgtgcccatttggggtgcactcactcaggagcctgggagcccccaaacagggacagttcatcactggcaaggtcggcattcagaaaggcaaagctctcaaggatacagtccatcaggctctgcgccgacacgggttccggctgtacccctcggggctgtggacaaacaccaggatgacggctctgccctcccacacccagccataaagtgacagccccagccccagccccagccagcccagcgatggctcaggtctcagcaggatgagcctgggatgtggcacttccagcaaccctaccaacacagcctgagacaaggggacatcgagagagagagagagagagagagagagagagagagagagagagagagagagagagagagagatctgaaagtccccaggtggggatgactcagtgcaggactcccccacaaggaggcgccactctgtcgcacactgcagccccatgcctcatttctcagcaaccccacaaacctgctctgcactcactcttgctgacagccaccctgagg

SEQ ID NO: 1513 - DNA, 1756 bp, Mus musculus
acatgcagaagccgctgctggggagcttggggctgcggtggtggcgggtgacgggcttcgggacgcggagcgacgcggcctagcgcggcggacggccgtgggaactcgggcagccgacccgtcccgccatggagatggagaaggagttcgaggagatcgacaaggctgggaactgggcggctatttaccaggacattcgacatgaagccagcgacttcccatgcaaagtcgcgaagcttcctaagaacaaaaaccggaacaggtaccgagatgtcagcccttttgaccacagtcggattaaattgcaccaggaagataatgactatatcaatgccagcttgataaaaatggaagaagcccagaggagctatattctcacccagggccctttaccaaacacatgtgggcacttctgggagatggtgtgggagcagaagagcaggggcgtggtcatgctcaaccgcatcatggagaaaggctcgttaaaatgtgcccagtattggccacagcaagaagaaaaggagatggtctttgatgacacaggtttgaagttgacactaatctctgaagatgtcaagtcatattacacagtacgacagttggagttggaaaacctgactaccaaggagactcgagagatcctgcatttccactacaccacatggcctgactttggagtccccgagtcaccggcttctttcctcaatttccttttcaaagtccgagagtcaggctcactcagcctggagcatggccccattgtggtccactgcagcgccggcatcgggaggtcagggaccttctgtctggctgacacctgcctcttactgatggacaagaggaaagacccatcttccgtggacatcaagaaagtactgctggagatgcgcaggttccgcatggggctcatccagactgccgaccagctgcgcttctcctacctggctgtcatcgagggcgccaagttcatcatgggcgactcgtcagtgcaggatcagtggaaggagctctcccgggaggatctagaccttccacccgagcacgtgcccccacctccccggccacccaaacgcacactggagcctcacaacgggaagtgcaaggagctcttctccagccaccagtgggtgagcgaggagacctgtggggatgaagacagcctggccagagaggaaggcagagcccagtcaagtgccatgcacagcgtgagcagcatgagtccagacactgaagttaggagacggatggtgggtggaggtcttcaaagtgctcaggcgtctgtccccaccgaggaagagctgtcctccactgaggaggaacacaaggcacattggccaagtcactggaagcccttcctggtcaatgtgtgcatggccacgctcctggccaccggcgcgtacttgtgctaccgggtgtgttttcactgacagactgggaggcactgccactgcccagcttaggatgcggtctgcggcgtctgacctggtgtagagggaacaacaactcgcaagcctgctctggaactggaagggccagccccaggagggtattagtgcactgggctttgaaggagcccctggtcccacgaacagagtctaatctcagggccttaacctgttcaggagaagtagaggaaatgccaaatactcttcttgctctcacctcactcctcccctttctctgattcatttgtttttggaaaaaaaaaaaaaaagaattacaacacattgttgtttttaacatttataaaggcagg

SEQ ID NO: 1514 - protein, 445 aa, Mus musculus
RGGRPWELGQPWAMEMEKEFEEIDKAGNWAAIYQDIRHEASDFPCKVAKLPKNKNRNRYRDVSPFDHSRIKLHQEDNDYINASLIKMEEAQRSYILTQGPLPNTCGHFWEMVWEQKSRGVVMLNRIMEKGSLKCAQYWPQQEEKEMVFDDTGLKLTLISEDVKSYYTVRQLELENLTTKETREILHFHYTTWPDFGVPESPASFLNFLFKVRESGSLSLEHGPIVVHCSAGIGRSGTFCLADTCLLLMDKRKDPSSVDIKKVLLEMRRFRMGLIQTADQLRFSYLAVIEGAKFIMGDSSVQDQWKELSREDLDLPPEHVPPPPRPPKRTLEPHNGKCKELFSSHQWVSEETCGDEDSLAREEGRAQSSAMHSVSSMSPDTEVRRRMVGGGLQSAQASVPTEEELSSTEEEHKAHWPSHWKPFLVNVCMATLLATGAYLCYRVCFH

SEQ ID NO: 1515 - DNA, 94427 bp, Homo sapiens
tctttcccaaggacttcaggaacccttctagctaaatcaaagcttagaaattcattcctcttttctaaaaggctatggtcctagtacagatccacccaacttacatgcattatcacaatgctggtgtgcaacagtgggcaagtcatgtatcactccaagcctcagtttcctcatctgtgaaatgaggttaatgacagtttctcttacagggttgttgggaagatgtagagagatgataaaggtaaagtgctagcttagtgcagagcctagtctttcgtcaaagcccaatacatgtagctaacataactagtattattaaacaataagaaacaactcaacatggggaatctgcatctggataatatcactgtcttaggattctccccaagagcagtgatttctcccagaataatggaagaacattctcatcttcaaagacaaaaatggctccaaatccccttcaaaaacttgaaaaactagacttcacctccagaactggttacataagctcaatgcagaatgaatatgcggggctccttgttcaaacattattgcgagtttcggccaggcacagtcgctcatgcctgtaatccctgcactttcagaggccgaggcaggtggatctcctgaggtcaggagtttgagacaagcctggccaacatggtgaaacctcatctctactaaaaacaccaaaattagccgggcgtggtggtgggtgcctgtaatcccagccactcgggaggctgaggcaggagaatctcttgaaactgggaggcagaggttgcagtgagccaagattgcaccactgcattccagcctgggcaacggagcaagactccatctcaaaaaaaaaaaaattattaagaatttcaaggctgggtgcggtggctcacacctgtaatcctagcaatttgggaggccgaggcgggcagatcacttgagatcaggagttcaaaaccagcctggccaacatggtgaaaccccgtctctactaaaaatacaaaaaaaaaaaattagccgggcatggtggcaggtgcctgtaatcccagctactcgagaggctgaggcaggagaattgctttaacccaagaggcagaggttgcagagagccaaggtcacgccactgcactccagcctggacaacagagcgagactcagtctcaaaaacaaacaaaaacaaagaaacaaacaaacaaacaaaagaatttcaagacaaagacagcagagcaaacaagtgcaggccccttctgagctcgggactctgcaatcacacaggttgcacacacacccatgaaaccagccaagttcacctacagcagcagaacaaaaaatagggttgtaaaattgcaggttgcaatatatattatgaaaaacttctgaagacagatggtagcttgcttttttccactcagcaacttacacaactgtagaacaacagcaaaatttttgagtccttgctgtgaactagagaccaggctgagtgctttacacacatactctcatttaatcatcacatccctgcattctgtaaaagatggaaaaccaaggattggagagggtaaggaacttgcccaagggcacatgagcccaattcagcctaattccagaacccacacccagaaccaccatgtgtacagtgaaagtgcccccgcaagcctcagccctgcaaactagagtgtggaggatgttgtaggggcctctggaaaccctccccagactcctcctttgctgaaagcatggagctgggaccggtttccatctttggatccaacttccctccttgaactttcccgcacatctctgaccctcctttctcagaacacatgtgattcccctagttccccctgaatgcctcctcctcccccaccggggaagttgctcttaccagacaggcagcgtgggattatgtttacgcatttatttttgtttctttttaatgacttgctgtaaagcttaaaatgtcttccgggtggtagagaggcaggggagtcgcccattaaaaatgaagcccagtaaaaatgaagcccagtagagacgtgagtgggagattctgggctgttaaccttcccgtgagttctgaaatagtgcagaactcatatatttaatatagtttcagaactagaagcagcaaatagagctgaactgggttcaaatcctgactccaccatttctcatctgtgtgactgtgggcaagttgcttaacctctctgtgccacggttcaaatggagatcacaatagtacaggctccagagtggtggtgttaatgaatgattatcgttattattatcctcattgttattactattgtttttagagctcatgggagtccttggagagactgtatagcttcatggctgagaatatagatgctgaaatcaggctgcatctgggattaaatcagggatttaaatcccacttgactacctactggctgtatgaccttggttaaataactggcctctctgagcctcagtttcctcaattgacaaattctcccctgggcagagggattggattagagatggcacgtgagcttcagttggatcaatgagactcaaggccaggactcagggtccaccagggaaaagaagctcttcccactggagctgctgagctgataggctgtgagcctggggctgctggggctctagaggacagcctgcttgagagtgaagctagcacaggggaagaaacataaaagagctggggagagacagagtcacaatgacgtttgaggccctggatctggcggtgcctgaagcaaggaagcctcctttggacttcccaatttcatgagccagtaaattccccgttttgcgaaagccacttttcagttgggtttttctcactggaaagtatccaggctgacaccaggatttccatttagcaacttgacccaggcctgcaagctagtgagtagcagcctcaggggttagaagctcctagctctgtaccacggtgctctgtcatccagcatgcaagccagcattctgtactgggtgttcattgctttcacctctttagcctctccgagcagctattttctcatctctcaaatgtggataaacagcaggcttgcagggctgttgggaaacagaaaattcaaagtaatgcttttaggccaggcatggtggctcacgcctataatcccagcactttgggaggctgaggcgggcagatcacttgaggtcaggagtttgagaccagcctggccaacatggtgaaactccatctttactaaaaatacaaaataaattagccaagcgtggtggcaagtgcctgtaatcccagctccttgggaggctgaggtaggagaatcacttgaacgtgggaggcagaggttgcagtgagccgagattgtaccagtgcactccagcctggggcaacaaagtgagaccctgtctcaaaaaaaaaaaaaaggtaacactattagttagcatggtttatggctgaaggttggagttctgtgcacccagtttctagtgccttgggccttggctttgccccattacttattccattgcagggatgtctctggctgtccctaagtcagccaaccagtcaaagtgcccaaactctcttaggcgagcatgggtgaatcttgtggggggaagagccatcttccttcctggctatgtgtacccagtggtgagtggaggaagctagatgaccttgaggattcttgaactctgagtctatgatgtacaaagaagccctgttatgttcatttccagaaccttctaaaactgatatgctcttctgggaatgatctgtattgcagggaaacagcaatgaaccaaatcgacttagtctctttctttaagaagtttacatttactggcagatacagatgataaacacataaaaatatacaacatcatatcacatggtaacactagggaaaaaataagtcattaaatgcctgctaagtgccaagaagaaaaaggaatagagtgatagagcactgtttattagaagtggtcagaagggggctctctgaggaagtgacatgtcattagagactcagtagggctcattcaggatcacaagctcttaaaactgtgctatctcccaggaagaagatcaggaccaatttttccaggaaacttgctgacctcactaagtcaggagtcagtgatctgttggaggcttggtaaacagccatccttctccactgacgactcttaggacatttaaaaaagtttaatgggtcattgatttgtagtgctgatttcctccattagctaaatccacgaaggaaaggctggagaagccgcgtgagaccattcctcaggcatgcctgccaggaaaaggttttagccatcatgtcacatgatcatttgtctatttctaaccagtcatcactaaagattcccaatcaccaccatcacatctctggaggatcccagggcatggctgcttctaggccaggccttggcagggaagtgccagagctttgcagatcaacaccaagcctcagagagtcggagtagaccttaagttcctcctctcaaccaaatatcaaggaaacagacaagaagtcgaggtccctgccctcctagaacatgacattgaggggcaggagaaagaaacaagccagcaaataaataagacacagatgagtgctaggagccaccagaagctagaacaggaaagggaggatcctcccctagagagtgactggggactattttagggaaggtggtcaggggagacctgtttggggaggtaacgtttgacctgagacctgaaagctgagaagatctgcaagaagcgtgatccaggcagaaggaacagctggtgcaaagatgctgggttgggagccagccccgtatatttggagatagacctgagactgcagggaagtaagcgaggggacacagtgacgggccaggtcacgtgggccttgtgggccagggttagacatgatttgggttttcttctaagtaggatgggaaactgttggaggattttgcataggagggtttcatgacccaaatattaaaagctatgtacacaatgaatggaagggcaaattagctggtacctgaaattaggggtttcgttcaggatcaatatttgtggcaaggtttcactctctgccactgtagtagattgagtggaggcctccaaaaagatatgtccaagtccccatacctgtaaatgtgacctatttggaaaaagggtctttgcacatgtaataaatttaagaatcttgagatgggattgccaaatcgttctggataggatgagccctgaatccaaagagaggcatccttgtaggaacagggcagagggaaatggggcagggcagaacaggagatacagagaagaaagtctgccaagacagaggcagggatcagagtgaggcagccacaagccaagtaatgactggagctaccagaagctggagaatgcaaaggaggaccctcccctggagccttcagagggagcacggcactgtcaacaccttgattttggactttgggcctcaagaactgtgagagaataaatttctgttacttgaagccaccaaatttgtggtaatttgttacagcagccactggaaacaagtacagcctctaaacagcccaaacttggaccctgcttgaggctgcctccaactcccctctcccccaccaagaccctgtgtatagcttcggccccattcaaaggctactccaggctgggtgcagtggctcatacctgtaatcccagcacttcgggaggccgaggcgcgcggatcacctgaggtcaggagttcgagatcagcctggccaacatggcaaaaccccatctctactaaaagtacaaaaatcagctgggcgtggtggcgcacacctgtaacctcagctactaagaaggctgaggcaggagaatcgcttgaatccgggaggtggaagttgcagtgagccaagatcacgccattgcactccagcatgggtgacagaacaagactctaactcaaacaaaacaaaacaaaacaaaacaaaacaaaacaaaacaaaacaggctactccagtcactgggcagcaccccctgcaggcgtgagggccacttgggcttgggatgggcatttatttacttacttagcttgacatacagggacaggaatgaaccagccctgtttttgttccaggatgctctcaggattgtgagttccagacaaaccagaacccaaaaagtataagggtttaagggcgggaggagcacaggagtctggacagtcacttaaaggaactaagacttcaattaggtagcttccaagtgtggcagctcccacagttttcactggaatgggcatttttgttaatttttcccctatggaatgctcactttctaaagacactgctgatcaagctaattgcatgtattcaataacatttcatttatctcctttatttgctattatttaaagatatgtagtaatgacagttaatatttattgagccactcagtatactaagagcatgatatgtactcatccaaccttcacatcagccctatgaggtgggcacttttattatctctgttttacaaaagagagcagagactaatgaaaatttgcccaagtttgcaccactagtatttattcagctggaacctggacccacgaagcctggctccaaagcaggctctggaaaccaggctagaatgcaggtttccataccaatgtgcaatgctactctggacaagtaattttgtctctctgtgcttcagtttcctcatccattttttttttttaagacagagtcttgctctgtcacccaggcccgagtgcagtggtgtgatcttggctcactgcaacctctgcctcccaggttcaagcaattctcctgtctcagcctcccgagtagctgggtctacaatcacacgccaccatggctggctaatttttttgtatttttagtagagatggggtttcaccatattgatcaggctggtgtcgaactcctgacctcaggcgatcacccgccttagcctcccaaagtgctgcgattacaggcatgagtcaccgcacccggtccccccctcatctaattttttatttttattttaatttaatttattgtatttatttatttattttttgagatggcatctttctcccgtcgcacaggctggagtgcagtggttcaatctcggctcactgcaacctccacttcccaggttcaagccattctccttcctcagcctcccaattagctgggattacaggtgtgcaccaccacacccatctattttctgtgtttttagtagagacaggctttcaccatgttggccaggctggtcttgaactcctgaccttaggtgatccacctgcctcagcctcccaaagtgctaggattacaggtgtgagccaccaggcctggcctatttttatttatttattttttttgagccagtgtctcactctatcgtccaggctggagtgcagtgacatgatcatggctcactgcagcctcaatctcccaggctcaagtgattctcccatctcagcctcctgagtacctgggactacaggtgcacgccaccacagccggctaattttttttttttttttttgagacaggatcttgctctgttgcccaggctggagtgcagtggtgcaatctcagctcactgcagcctctgcctcccaggttgaagtgattcttgtgcctcagcctcccgagtagctgggattacaggcatgcaccaccacaccctgctaatttttgtatttttagtagagttgaggtttcaccatgcttgtcaggctggtctcgaattcctgacctcaagtgatgcacccaccacggcctcccaaagtggtgggattacaggcgtgagccaccacagccagtcagttttctcgtttataaaatgggaataatagcacctgtattgaagggttgttgtggagattgaatgggaatgtgtacttagaattccaggcatagtgcctgccacaagcactcaaggaatgagctggagttcagctgataataccaggcagtgtctctgggcaacacggaatgaagacaattctctcttccaggttttcaaacctcctggaattcacaacgtccacatgacatgccaggcccagagggggatggtttaaactggagcctgcaggaaggcaacctgaccaacctgctcatgggtgctttaaggatcataggtacgagaatcagctggagttgttggtgaaaatgcagattccgggtctcatccctagaccaaagatatctgaatcatttggcgatgggtccaggaacctgcattattcaacacacttcccaggtgaccgtaaatgtcaaaagacaaaattacaacaaacttaaacatcttaattggcttcattcatgattctagaatcgggcaagacttcattcctcaaaatagcacaagtgtcccaatgagctgagcagaggaggttggttttatagacagaaaagggctgaaaaaagcagaaacaaagaacaaaaagcagattggtcatttcaaagttactttccttgtaaggcaggaacagggaaacagaacaagagagaaataactgattggtcgcatcgggttacttcaggttactttttgttgtaaggattaaagcaaagggaacttcattatgttgattaaaacggtctgcttgggaaatcagggtgtgtatctctcttctgattttgtgaaaggttatcagtctgatgatgtagaactttagcatgagtgactccattttgatttttagtctagtctgttgagaccctaatgccagaactttttttgtttgtttgtttcgctcttgttgcccaggctggagtgcagtggagctatcttggctcactgcaacctctgcctccagggttcaagcgattctcctgcctcagcctcccaagtagctgggattacaggcatgcgccaccacgcccggctaattttttttttttttttttttttagcagaaaccgagtttcaccatgttggtcaggctggtctcggactcttgacctcaggtgatcaacctgcgtcggtctcccaaagtgctgggattacaggtgtgagccaccacacccagcccttttttttcaagacagggtctctctctgccacccaaggtggagtgcagtggcgccaaaacagctcactgcagcttccacctcctgggctcaggtgatcttcctgcctcagcctccccagcagctgggccccaccacaccggctaattttttaacttttagtagtgacgaggtctgattctgttacccaggctggtctggaactcctggcctcaagacatccgcctgcctctgcctcccaaagtgctgggattacagatgtaagccaccgcgcctgggctcctatgatttttatttaacataatgcaccatggaatttgtgctctgcttagttcagtctgagcaggagttccttgatacttcgggaaacactgaaaatcattccatccccatccattcattcctgcagcacccaagtggaaattctgcgtttcagacagggacactacccttagagagcagtgggcttccccagcagcgtagtgaaacatgatactcctgagtttcatgaaaaaagggcagacatctggccagagctgggaggcaggaaatagagcacggtgccctcctcccatactccagcttggattactgaggctggggcccaggccctgcaggaaaggaggtgcatgactactttaaggccactcactctgtgactcaacgggccgggtcggggctggaactcaatgccctcccgggcctggagagcccacgcgccgtgggcggggctcccggggtcgcctaggcaacaggcgcgcgccgcgcccgagcccagagccccggagcggaggagggaacgcgcgctattagatatctcgcggtgctggggccacttcccctagcaccgcccccggctcctccccgcggaagtgcttgtcgaaattctcgatcgctgattggtccttctgcttcaggggcggagcccctggcaggcgtgatgcgtagttccggctgccggttgacatgaagaagcagcagcggctagggcggcggtagctgcaggggtcggggattgcagcgggcctcggggctaagagcgcgacgcggcctagagcggcagacggcgcagtgggccgagaaggaggcgcagcagccgccctggcccgtcatggagatggaaaaggagttcgagcagatcgacaagtccgggagctgggcggccatttaccaggtgcgggagcgccccggagcgtggcgggcccttcgcttaggccgcttgaacatcccctcagacctccaggccccagactccctctgggtcttgccctctgcctcgctcctactgcttgaggattcgatgggacagcgacgcactgcgtcccccccccctttgtccccggggcgggcgtgtttctcgccgcagcgtcggagcccccttcgatcccccacctcccttctgttctccagctcgggtgatctctcaagccgggggaccgccggtctgtgctctcaacgcgaatccctcgcaccccgaccccgccccctgcctgtccactctttgtcccctggggtgatttagcacccccactatttccttttctggagtggaccacctcagactctcttcctttgtctccctgggggaaaaggttactccccccgtccctccttcacatttcctttcccctagtctcagtgtgcgtcgagtcccagagatgacagtcccctttcccctttctgttcattcatttattggataggagttggcaagcttattctgtgctaggcaccgcttaggcattggaggtggtgtttgctaatcaggacaggcaagatcctagccttagtggggcctagagtcgaatagggcaatcaaacacaaaagcaaataatttcagatagtgacaggtgctgtgaagagaacgacttcctaacggggtacagggtgactgcatagaaggccggctgtcttagagaaggggatcagggaaggcctgtcaaaggaggagacatttgctttgtgagctgaaccaagaggagcagaaagccgtgagaatatggggctaaagaaccttctagccaggaggcctgcggtacccactccattggggccatgatattatcctttcaggcagggactcaggaaggttaacgttttaaccctctctaaaatagcatctttcctcaatgagcagcttagtctttggtcgtggcagagatgaccttgtcttaggagtcatctccttgtgtgttaaaaagttaggaaaggagggtttctcatatatctataaaacaagtagttaaaaacacaaagagctcttcctttcacaagcagctgaataaaatacatactcccaattaaatgtcattgcgggggttgttaagattaactaaaaccacacttgcacagtatcttaaataagcgatatacagaatagagagattttgttacttgtgtaaagggagacagcagatgattctgttttcagcttataggctcaaaaggcaaattgtgagatccatcagctgtagtattaaaatctattttgagctccgcttagaaaggaaaaaaggtttaagcagttctttggtatgcttgactaacaaaagcctttttttttggcagccttgattttcatgtggatttacatcaagcttatttgacaggattctttttatttggactgtagtgtgtatattagtttctgctagactaatatttctaaccactgtaatctatatactaataagtatgattgatcagtatataaaatttgtatgccatatctggtctctgaattagctgaatgaattccataagggactttgagactgtgtagacaaattttctgcatcagtttaatgcagtagagtctaaaatgtctttaaatgaaaattgttggtctgaagtgttggagttgattatgatacaccccatcacagtggaagcattgtggagagaagtcttttccactgaaattgactgagttgacaacaagaaatacgtattgtaacttagttcttagttgaattttatttcttacaattttaagccagagtgggttgacctgtcacccaagcatggttaaaattgtattcagcatgcaactagcatggagtgtgtcagtcttcaattcatttccttcattgttcttaagtttttctgccacaattaaaccccacaagttagtcaaggtgttgagattttcactgcttcttaatggattgccacattccctgaggtagtttcttttggtcttagagaattgtcagggccagcttttctcacctccactgtatggatatttttcttttctaagatcttgaaatcagaagcttttctcctaagtgtaaaagtagctctttgtcatacaactgtagcgttttctgaaacagagttcagatgaccttgagtctaaagtggctaactttccaaggtgtgtatcgctttaccaaaaccattatttttcaaggattcaaagaatgtgtttacaattgatagaaaatggaagtttaaaaaaattaatactttatagcatgttgaaatgagggcagccttatacaaagtcatactttgagcttgcctagcctattgtgatcagagaataatgtaatttttgcttacaacttggtaagcaggtcagttattctaacttattttctgattagaacaaaaagatgtaaaaacttgaaaactattgggaaaagaacaaagagtgaagaggacttttgagtgctgaggaatgtggcagcttggaaaacaaactttttaggcagagattctttgctaggtcagtttgataaagtgagcataaccgtatttttaatctttaatgctaatgaatagcatagatgctaataagcatctaggtctataaaaagtcagctttgatagtgtatatagatggctttaaacattgttttctagcatttaaacactttcaaatcatccggttgcttgattgggcctagctgtctaagaggagagaatgagcccagatgaggaaaagagattgattttactgagctagaatgagaggagagagggttgagtgaatgaaaagaatagctcatgtgctcccctccatctgtagtttaagaggggttgggtccggtgttttgcttgttttctcgtctgtaaattctttgattctctgacaccactcactatatttcattgtgaatgatttgattgtttcagataaaggggactgcaataatagcttgtgacatgaaggcaagatttattcatgttagaggcaggctttgtaaaatgggccactcttccaattgacatttgtttttatagctgttttcattatgaaatacaatctaatgcctgactaggttaaaaccatgttgtaacaatagttcactaaaattccttactgatatacagcttatgttgttatattccaaaaagatgaatattaaaatttgccaataatgtttatttaaatactattttcttcagaggaaaaaaaactattttatgcaaaggagaaagatctatacactatgactcacttcacttaaaaaaaaaaagactaacggaaatgacatggagagactgggaagttctagtcatcttgagtgacccattagatctaaatgttcttgtttagccctggtttgagtgaactaaatttaggtgtctgatcagtactttggaaatggtgtaaatgcctttgtaattgtctggactgatattagattaactgggagcacaagtagaaatagtgaaggaaagaactttttgctattgttatttgacatcactggcatatttataggaatactttggtgtttttggaagtaagtaaaccaaccagtggttctaaaaagtcagctgggggataatggtaatgccgctgtttcttagctgcaagttatctgccgttacttctcctccattttgcattttatcttgaatagctcctcaaaacctattaaaatacctggtattgaataatgtaattgaatgtgtacgaatttcacagtggaaatgaataagaaatttcctgtggaggttttttgacttagctactgaaataacggccttttgttgtgtgattctttcccttttctctttgttaaagaaaactgtcttgtgatcttgtagattacagaatccttttggcaatttctgttcctagcactgctttttctttctttctttcttttaaatagaaatggggttttgctgtgttgcccaggttggtcttgaactcctggcttcaagcgatcctcccaccttggcctcctgaagttgggattgcaggcgtgagcaggtactttttctgaggcctgcctgagcctatatatattttgcacaatttggcattcctccctacagtgtttatgctgatttgtttctggtaacaactaatactggcaaatcggctgggcatgttactttatgctgcccatattcaggaaaattggaattctagctgggtcattgttcccagatgatgtagtttggcaccagccattccatgttcacattttgagtatccaggagggctggggactttggagtagttggtgattccctctgccacatttcactggttggtcactatggcatcctttccaccacactagtagtctaggttctcagatgttgcttatgagcctgcaatggtttctagtttcacactgcagaaatgagtgaagccggttacccgttaatatggtcccatcatcactagagtaattcattgttctaaaaccagatctgagtctctcactcctctgcaactacttctgattctttcataacacttgtaaagtccaaactcctctttagcatggcagccagcttccagtccttccctcctatgtggcttccattctagccagacaagaaagggcagcgttctccaaactcatcctcgcccttcattcctctataccattgctgagcactttgttgaggatgcctctcccgttcaatctagcttgcatcttccagctcgaatgtgtgcttccttgcaccagagttttgttccgtcacctgtgtgttttcatacaagctggcacatatctcttctaaagccctgctgtcattgtagctgcgtctttacaaacattttttttttaaatttttataaagtcaaggtctcactatattgcccaggctggtctcaaactcctgggctcaagtgatcctcctgccttggcctcccagagtgctgggattataggtatgagacactgtgcccagctgtagctgctactttatatcccaggtctatctccaatggagcccaagcttcctgaggccacctgttgtatctttctcattcatcttgaagtcctctgctcctggcacagagtaggtacctaacaagagttgggattgaattgatggtcagtactttgctagcctgatggtataaagatgtacaaaacatgttcctggctcccactctaggggggcaatgatggaaacaaatagattagcccacattagtaccaatagtagaggtcactctgggagaaggcccccaccacattttgagtcatggcctaatgaggtaatttagtattgcctgctgcagtggctttggaagaaaggctggcattcttagccagtagaagctgataccactgttttgtttcacagaagctttaaatataacaataaatttgtgcttggcctacggtgaactttacaggcaacttggaggtaatatgtttgtctctctaagaattgttgaattcctcttccctcatccctcctgactggttctcacaagcctagcgggcctttgcatgtggttggttcataaaatactttttgattttgggatataaaatatagttctccataaaataacgactgttaccaagtctttgatttttttttttcaaactataaatggtaatgacattctttggcctttgatcagaccacccttaggggcaagagagtagtttcatgttttgctttttctagtgtcccctgtgtctgggtatagttgcagtctcagctgtcatactaacagtgctgagtgagtcccttactttctttgggttttggtttctcccttgtaaaaatgatcctggactaactgatcattaagttcaggtcaagtaataaaaatccttaatgtactcacaaatacaatttaatgttcctgaataatccttgtaaaaactgcagcggttactcagttttgtaaggtgtggttgggtactattaggctcaaaagtttataggagctttgtgagtatagttaacaactcaaaagaatggggtgttttttcccgaggggcatgaaatgtttttgataaatagagttcatttgacttggtaatgtggaaaatgagtagccctgacacgtacgctatgcttttgcagtttttctctcaagtagcaattgggtggcttttcctgtaaaagatagaggaactgattcttgagaatttacgaaagcttcaaccctaactaggtatgcaaagaatagttgccctttatgttgtaattttaggaagaaacctacatctggtctaagtttcatttgaataatatgatagtttacacatctgccatatttgagaagaaagtacctaagtctccagcattttagaaataatgctttactttgtgtagaaatggtctttagagtttaatagctgctgccctctcctttttcaaagcagcttgacataatcatgagtatcttgctgacagcttgtaaattttgattgtatgaaaactgaaaataagaccatttcacatggaagattccctcctgccctgaaacagccaaagaaaactgtagccatcaaatctattgatctctgggctttggtacaagtcacactactacaaataaaataataccaagtacttataaatgattttcagtccttttaaagtttatttttttaatattttttttgagatggggtcttgctgtgtcgtccaggctggagtgcagtggcacaatcttggctcactgcaacctccacctcctgggctcaagtgatcctcccacctcaggctcccaagtagctgagactacaggcatgtgccatcacgcccagctaatttttgtatttttttggagtagagatgggattttgttgtgttgcccaggctggtcttgaactcctgggcttaagccatctgtctgcctcaggctcccaaagtgttgggattacaggtgtgagccactgtgcccggcccagtcctttttttaagagaaaaacgtatgacatcgttcgatttactgagtgcttatggttttactaaggcagtaaggttttatggataccctatggtaattagatagaattagtgctctgaagtcagctctgtaatatggactcagagtaaacatggcaaagggacacttaaggtctgcattttctctgggaaataaacgtattctttactactctgaatctagtgctgggaaattctaaatccttcttgaggattaaccacttgaagtaaagttttgggtcccaagtaggcttgtgtccctgtctccttctctttacttttcagatgtttcttcctagagactgaggtatattttacttttacagatgaagaaggaagcctcggctgtgtttgtggcttttgtgggtgagcaacatcacttgcaaagataagatgagcttagcaaaactaggctttcaaaataatttttaaaaatttcttagtgattagaaaaggaaaactcttcccttgtctctgttaagaaacgtttttcgacttttttcctttcttaatggatcttttattggcacttctcttccttttgcagaatcttacttaaaagtcactacgttacattacagcaaacagcttagctaatttttatccagatgggccccggttacaggattgtacactattgcgaatttcttacaggaaagtgaacatcaagtaattattccaaatagagttctcttaagaacgtgagttacttaaaaatgtctaaggatgaagtcacttctgaatataacttcactcaagagaacaaataagcaaactgcatttagcataacatggtaaattagctttaactctccttgatgtttgaacatttgtcgctgttaactactgtttcacttttcaaatagtcagggcttagtttgcttctgtaaggataaagggaaaatacgccttcactgagtcataaatatttttgtggctaacttttgcacagagaaaagaggcctctaagaaggtacccagtgaatttttttttcggggcagggagagaatatgtcattttttggtttgttgttgttgttgtcattgttttgctttgttgtttttactctgaactgaactgtatcttgacagcacttttgaattaagagcattactcttattgttctctactacctggacgccacctccctgttgccatagtggtaaggatcatgctccgaggtggggtgaggcagaatggggccaagatcagaaagttacattaagctacatcaggtttatacaagcataaaaccaaatttttggagcagtccccagaatacaacctggtttagccacacctaaaggttgctcttgaatattccttgagaatccacatccctagaatgctgggtttcaatgggccctttatgtacctatcatggtgtcatttctgagcatttctaaatattccttcatgtcttactgacagtttttcttgaataaatcttaggaatattagtgccattatcagtattttgtttggtctgttcacaccacaaataactacccaggtctgctacttgcccctatttctctacctgctaatgaaaatgcttttgaaagtttgagtaacagtattggagtgtgcacagtggtattggtaggttctgtactcatccttaaccacttgttttcatcctttgtgagcttgaagtttctccaaaaaatttatcacaaaacttatcagacatagttaatacactcagagagagaatcactgaaaaagtagatgtagtttaacaaacccagtgccttttttttacccatgaatacatatttgtcaactaaacctcattttgcaacttgttccactactcgaatggtaacaaacttttggtttcccaataggtttggaagatgttgcttttgaaagtaggaaatagatggctttagaagatggaagaatattttgtttgaagtgggagcgtggtatgtccttagctgtctgtgaaatgcagctgaagatgggtgtgggccttcatctgcatttcccatcttcagtttgaggaggtagttacccttctaaccacttaagaactgcatggtacatgctgttttatttacagggcaaaactgtgctcccgtagtttccctggtgcttgccttcacgttaacacagtgtcatcgtttggcagtgtttatgtgccagggtccatgttagaaggaggaaaggtatagcgaagttaaagggtgcagttggcctcccacctttagttttgtaagtgcctttaaagtttgatttttgtaggttgatcataaggaagtgataagtatgttaggttatttgtggtttgagctaattttagtctctttttacagcttgctttgtatcctttgccattaaaacatgctttctagaaagacaacttttgaatgtaggacacagtctatattctatacttggctacatttcaaaaaatattttctcagtactttggaagttggacagttggaagcatagtgacagtatttaaaaatctttgattccggccgggcatggtggctcacgcctgtaatcccagcactttgggaggccgaggtgggtggatcacttgaggtccggagttcaggaccagcctgaccaacatggtgaaaccctgtctctactaaaaatacaaaattagccgagcgtggtggtacatgcctgtaatcccagctactcaggaggctgaggcaggagaatcgcttgaatctgggaggcggaggttgcattgagccgagatcataccattgcactacagcctgggggacaagagtgaaactctgtctcaaaaaaaaaaaaaaaaaattaagtgatttctttgctttgtgacacttctacttttccagcaagtaaattatattctttcatacaggtatgaaattcttgttccaagctagtggttaaaaaggcacagttgatattagaggatttgtaaaagattatgaccacgcctgcaatgtactgaagcaaggctttgctgggctgtgtataggaaaccttccccagcctgtgcccttgcttgatagaacattttgctcctaagggtaggtgcctgtatctgtctccagtactggttagtttcacacagaacagttgtgtttcagagctttagtctcaagctgccctgctcccctgaagcagccaccctgagcatgtgcactcacaggaggggacatgtgaggtcatggaagaagacgactcaggaagaagaagacttgggtttgggttctgactctgcctttgactgttgtgggattttgaggagttgcatacaggatctgtaaaatgtagtcattagactagactagacagccatatagcattacctagatgtaactttctacaaagacatggtcacaggagaagaccagagggtggggtgatctttctggaaaaattggggcttcatgccttactcatgctagatatggtagcattatatggctgtgcctgatccccctaatctaaaagtgggacagaactttaaaatttcatattaactcaaattaaaacttgaaaaaaacccattatttccttaaaaataataaaatgccctgtgggggcataagtcacattatattttaaaattcctgaatgccacatggatgaatgtagttccttttgaaattcttcttttgtctaaagaggaatgttggattttgtaattggactaaaaaatcttccatttgagagagaaacagtctgctgcatgttctacccttgttcaggataaaacccactaatagctaacatttattgaattctgtgttgtgcctcaggcactgtgcaaagtcctttacatgcaatgctgtttattatatactgtcaattggtctataacagcaggaaatgtttcaggaggacaatgaggtcccagaccctcagtcttctcctgtgtcctggattcagcttcacaatagcactatggcagtgtggccactgcttcagcttccacatacatggctgtgaagagagacaggggattgtgctaagcctccccgatttattaggacataggaggagagagtttgtagtttttgacctttgcctagttttctaacctctttcctagatgtcacaaattggccacccacagtcatattttgcttgcttcacgcaatgctttttaaaaaagagaagagtttaatttgtgccattgtttataaatgaatcaggagaaatgacatgcaactctggattctggcctctcttgaaaaatctgaaaatcacaccgtctgagcttacactggcagtggtctgctggactgagggacacaactccttttggatgtacatgtgtgcgttgcagagtttaccacagtcccacagtgggtcacactgtccttgtcggtgtacactacctagcacttgagtttgcaacccctaccccaagctgagttttctcgtcaagcttgatgttaatgttatgtgatgcttggccttgtaggtatttggtatattatcgttagataaaattgaagcaaagggctaaagggttggtggcctgagggagtgcccttgacagtaaagtctaggataaaatcattggccaggtactccttcccttcccgcccttcctcttttctctttatcctcagcctccttctgctattttgaggaagttagaagccaccaccattttttcccacctcaggcaactgagtgtggctgtatttctgtcccatgttcagttatttccaggaactatttttgatgaccaacttgaagttacattgggtgggcctaatgggggctgataaaagaatgaggtgaccaaatatgcttgcactgagacggctacgaagtaaggtttttaatgacttgctttgtgacttggtcaggagtgataccatttgtcatgtgtccaacttcatgactaaatggttgctctaccttatcctcatagctataataaaataaaataaatacatacattgcagggaggaatgtatcttgttaaaggtctctcccttttagcaacaaaagtacatattatgttgtagaacatgctttttctttgatccttcttgaacacctattactctatagaggtatgttgtgtatggcaaattagaacaagcaatagataaggatgattctttaccattataacccagtcaaggtctttgtcctaagttttgtacctttctccagagggaaaggtatttgtatttatttatttatttttgaggcagagttttgctcttgttgcccaggctggggtgcaatggcacgatctcagctcactgtaacatccgcctcccgagttcaagtgattctcctgcctcagcctcccgagtagctgggattacaggtgcctgccacgatgcccggctaattttttttttttttttgtatttttagtagagatggggtttcatcatgttggccaggctggtcttgaactcctgacctcaggtgatccatccacctcggcctcccaaagtgttgggattacaggcatcagccactgcctccggccaggtatttgtatttttagtctctatgccttaccgtctcagatcaggaggatttggtgatttatcgaatgtgggggaaggggaagaagaggaaacgggaggaatgttccagattagggaaatagctagatggaagatgcagcccctcatcaaggtggggacacaggaaaaggaacgtgtgcaaagaagatggtgatctggttgtgaccatgttgttagaggacgtccagggaagcatctggtaggtggtggggtgtttaaatatagaacattcggagaatgctccgaagcttcagagaacccttcccaaaaggacaaaaccagctcagtgttttagcactccgggatcatatggcatgacagcatggctgctttatacttttttgtgtatgtgaaattaaaaccaaccactcaggaccaatttctctgaagctttttgtcaatctttcatttgcttttctcgtctagattgtaagctccttgcagccagtgtctgttgattcagtcattcaaaaaataatacatgaacagctactaggtaccaggctctgtgctgggcagttgggatatgtggtgaggaagacaaacttggtccctgcccttaggaagttcagtagtccagcagacaaagtggctgaataaagataatctcagttcacagtgataagagctcttacaggcctaggctccaggtgctgtggggatgctcaggaaaaggtatctaattgggattgggagcaggcaaaacaaataaaggatagtgtataaaggtaatatctagttgaagttctgaagggcaaggaggagtgagcctgtatattctctgagtctctccctaatctgggattgacttcttgtccgtctctgttcatattaagtgtcacctaggcttgaaagggtgagatcatatttcacttccttcctctttggtcttaacctttctctgctaccccctcacacaatgcatatgcattattctcttattgtatatatttttcctctcttccttttcatgtttcctctgccattacttttaacctcgactgccatatggcctctaaacgcttccagaagggtagcctagtggaggttattccatcatggccttgagctcatgcgaccagatagtgaaggcatctgtgtaggtgtcttctccaggagggtgatatttgtttcattgtaaattttgtagccctagaacaccaacaacagtgcacagtaattagtaggcaggcagtacaggattcattgaagtgaagtgataacttttatccaagtatgtatgcagataatctttgatttgtacaaaaaaaattatattttaatatgtaaagattttttaaaagaatcttcaagttttagccttcccactaggaatatattgaaaacatgtgcctagttcactgacttgcagctgccactatgagaataaaggtctcatttagttgttgtgaattttaagggatattttcaatgatgttggctggtttatcccattatgtggtctttttttttttttttttttttttttgaggtggagtctcgctctgtcacccaggctggagtgcagtggcgcaatctcgactcactgcaacctccgcctcccgggttcaagcgattctgctgtctcagcctcctaagtagctgggattacaggcgcctgccactacgcccagctaatttttggtatttttggtagagaagggtttcaccatgttggtcaggctggtctcgaactcctgacctcatgatccactcacttcagcctcccaaagtgctgggattacaggcgtgagccaccatgcccagcctatgtgctcttattagcaattctcagtacacagatagctttgagtgattctttcaagtcaagtaccttattaaaaaactcaagtgtactgataattatcttacttttaaatggctaagtgataagactgaatttttaggtactgtaacacttcagattacagattctgatatttttatggttatttatatttatttatttttgagatggagttttgctcttgctgcctaggctggagtgcaatggcacgatctcggctcactgcaacctccgcctcccaggttcaagcgattctcctgcctcagcctcctgagtagctgggattacagtcacccgccactacagccggctaatttttgttatttttaatagagacaatgtttcaccatgttggccagggtggtctcgcacttctgacctctggcgatccgcccgcctcggcctcccaaagtgctgggattacaggcgtgagccaccgcacctggcctggttacttaaatttaaatacaaaaattatgttgattaattctgaatgatttcctgattgctccccgtttaccattcacacatttattaaattcttcgcttgccatatagaagcagtctctctgccatatatgccatatagataacagaactagctgtctgcaaaccactgaaattgtgaaaacatctccccttttttcctgtttctaattctagctatgaggattatatacagaagtagtcctggatttgatttttttttttttttgatgattgttttttgatagttgttgactacaaatcatttaaacgtctgaaaggggaaaggttttccttaaaaatggatgacaaaggagaataaaaaggtattttgactatttttttgaatgatgagttttttttttctctttcttgttttcttttggagtcatttatgtgtcactgagtggataccatggaacatgtggcagaagtagatatatggggtaaaagaaccatagttcataagctccttgacagaatcactgaagtgtagccgttatatggccactgtcgcagggggaggcagcagttttgaagaaggggatgagtaataatgagtgataaaaaggcatcctggatagaagaccaaactctgcagaagaccccagtttgattatgcttttgttttctgatttgcggaggagagtgaaaatgcctgaggggtgcgggggagcacatagggtgtatgtgtgtgtgtgtgcgcgtgcagattctctctttcactgtatgtatttgtatgcatgtatgtatcttaggacttaagctttctagtcaataaattgccatagtggggaattgcttaattgcttgccttctgttgttgtatttaatttaattttatttttaatgatttttttggtggggtacagggtcttaactatgttgtccaggctggtcttgaactcctaaactcaagtgatcctcccgcctcgggctcccaaaatgctgggattacaggtgtgagccaccatgcccagcttagttgtattttaaatgggcctgtttgcagcattccctactccccttagtttacctggctcacaacctgtctttccatatcaaggcttctgtcacccctggcccatgtcagtgcattggggcagcccacccagcatcatcacctcatgtcccagggaacttcctgttcctctcttccagctatttccttccctggcagttgagatagtctctacctttgacctactgttaagctcagaccttctgctctctagttacagcctctgtgctgccagattccctcgctcagttgctttctctagtttgggttttctcctttattcagatttccagctgtttctctcctccccccaccgcagcctcctcacttccctccttatgcatctgagactgtggtcagtcactttagatgctgcctctccactgtacttgtgtccatcttcttacctaccacctctagccctggagcaggctcttcccctgtctttgtcttcctgggcccaggctcctaagcgctgctggaaaaaaaatcccccagtattgagcccctagaaatccagtctttaatcccaaatctgtctcccccagcatctggccatcagatctaaagcttacctgccatcctttccacctcatttctctcacaggggaaaaggagcctttgctcctagagtctgcgctcctgaccccttcccatctcacctgttcaaggcatcttgcaataaggggttggtgactctcgaggaatggatcccaggccctccctattatcatcttatgtatgccagttcaacgttctcagcttcctccagccgagacggcccctccagccactgctttatactctccttctctggttgaaatttttgaagtaaataggtcactctgcccatcgttcatcttccagtcactctgtgtgtttatcttccagggaagtgaggctctatgctaccaagccactgaaataatttttttttttttccagactgagtcttgctctgtcacccaggctggagtgcagtgccgcagtcttggctcactgcaacctctgcctcccggcttcaggcgattctcctgccccagcctcctgagtagctgggattacaggtgcctgtcatcacgcctggctaattttttgtatttttggtagagatggggcttcaccatgttggccaggcttgttggcatgttgaccatgttggccaggctagcctcaagtgatccacccgtcagcctcccaaagtgctgagattacaggtgtgagccaccgcacctggcctgaaataattcttgacaagatctgcttccttgttactaatacagtggatattttgcatcctaattttaatgcagttcagtgtggtagccctgtatttgcatattgaatattcccttccctgttttaataactctattttttccttttcttttatatctcctgcttctctagctagtcctagaccttactcatcggtgtcttctctgtttgttcctcaacttgaggagttcctacagggtttacccaatctgctgctttcatttagcccttttgttctttttgagccatctcattcactcacccaggatgtagcatcggcccttgaattcagtgtgcacacatacactgtgcactatgggacagccttcagaggcactttgttcctgaaattgtggtggtctttgcctctcatggagccttgcatatgctgtttcctctgcctggaatatcctaccttttacttaactgattcttgttcttctttccagtcacattttgtacatttcttctgggaagctttctctgatttcccctttccacaggtccaagttaactgccttgtctaggtcctcccatggccctctgaaggcctcctttcatagcaccatgtctgagtatactgtaataacacgcattgctctgtaatagcctgtttacttacctattgccaagtaatctatcaagtcttataaagggcggggctgcttttgttctagtcatttgtatctcttagtacccaatatagtgtttggcatatagaaaatacccaacaaggccagtcgcagtggctcatacctgtaatccgagcactttggtaggctgaggtgggcggatcacttgaggtcaggagtttgagaccagcctggccaacatggtgaaaccctgtctctactaaaaatacaaaaattagccaggcgtggtggcgggtgcctgtagtcccagctacttgggaggctgaggcaggagaatcacttgaactggggaggtggaggttgcagtgagctgagatcactccactgcactccagcctgggtgacagagtgagactccatcttaaaaaaaaaaaagactccatcctaaaaaaaaaaaaaaagaaaaaagaaagaaaatacccaataagtagttcctgaatgaatagatgagaatgctgtttagaaggttcatgaattggaaaccgtgattgctagggaggctttgagttgatggtattgtgttgaaccatgtgttacccaggatcaatttagattttacactttgttttctctgttcctttttatagtaattttctgtatgtggtgttttccccccatgagattgtataccatttctcagcgagaactgtgtgtaatgcttggtggctccctcatggtgccttgcatggaattggacttcgtttcagtggatctgatcccagttatgttaatgctcgatggagctaagtcttatctcgaagcagtccatgtcttcatcagctggccctgcctccatgccctgcacagaccatgccactctggagaggtagtttccctgtggcttattagtcttatgttccagtgtgctggccaagtatgagagacatcagtggtatgagagagtctctctcattcaaacttcgtaggttttgtagctgggactgaccagtgctgacaggaaatagaggcatttattaaaagccagagatttttcaagttgcaggaagcaaagctcttgttagctatgattttgtggtgggtttggtagtccaatataaaagtaaaaactggatgacaatgggaggagcatgcttgggtctccaaagttagatcatttttcctaagtaatttgtctttaaacttttactggtttggaatttcctgagattttgatcttgccagaaagtttatagcaaaagttctgagcagatgacacttttgtgtctgaaaccaaatcattgtttttgtttttaacttttttcttaatatattatccttagttcagccctgaagtttattctgttatttgtggatctcaactttccccccatctcctggatctttgtgaaatgaatggtattaattgaatagagaaggaagatataaacataaacttagtcaaaaacttgttcttgactaggcaagttgggctttatagctttgagctgatgacatgtctattcttgtgaaaaagggatttttagtgttggtttggcttcttgttatatttgatttattattattatcattatcattatttttgagacagagtcttgctctgtcgcccaggctggagtgcagtggctcaatctcggctcagtgcaacctccgcctcccaggttcaagcgattctcgtgcctcagcctctggagtagctgggattacaggcgggtgccactacacctggctaatatttgtatttttagtagagacaggtttcaccatgttggctaggctggtcttgaactcctgacctcaggtgatccacctgccttggcctcccaaagtgctgggattacaggccttagccactgtgcctggctgattttttttttttttttttttttaggtttgttttaactggaactttacgtgaatgtaattgaatttagaataaaagcacttaatttcacagtgtgcagtgaactttctgttacttattttaacagtaaaaccccttgcagtaaatgacttggagcaaagattgcttttttaaaaaatgttttaatttgtttttcttttcttgagatggagtcttgctctgtcaccaggctggagtatggtggcgcgatcttggctcactgcagcctccccgcctcctaggttcaagcgaatctcctgcctcagcctcctgagtagctgggactacaggcacatgccaccatgcccagctaatttttgtatttttagtagagacagggtttcaccatgttggtcaggatggtcttgatctcttgaccccgtgatccaccctcctcggcctcccaaagtgctgggattacaactgctgggattacaagtgctgggattacaagcgtgagccaccacgcctggccaattttttttttttttttctttttgagacagagtttcactctgtcacccaggctggagtgcagtgtcacagtcaaaactcactggcagccttaacctcctgggctcgaatgatcctcctgcctcagcctcccaagtaactgagactacaggcatgtaccactgtgcccagctaattgtttttttattttttattttttgtagggacagggtctcgctattttgcccaggctagtctacaactcttgggctcaagcagtcctcctgcctcgacctcccaaaatgttgggattacagggacaagccactgcacctggccaaggattgttttttaagtgaactgagacccagccttattagtggtcccagagcagacctgggacctgaagggaacccttttcttctggtccagcgtctttcctctgatgggctactttcctggagcctttgattgcctgtcatcagagtaactgagtttgaacagagtaggtagttcctctccagaccaccacactcaccagctttcattctgcttctctcgtttagactgtggttctgaatcctcagttctatttactgagtgtttttaaacataaaaatgccttttaatgagattgaaggccagaggtgggacagttgaggacaaagtagaaataaaaccttcaaggcggggttgttggtgggagtctttttttgtttgtttgttttttgagactgagtctcgctctgtcacccaggctggagtgcagtggcacaatctcagctcactgcaacctccgcctcccgagttcaagctattctcctgcctcagcctccttagtagctgggatttcaggctcccgccaccatgcccagctaatttttgtatttttggtagaaacggggtttcaccatgttggccaggctggtctcaaactcctgacctcaggtgatctgtctgcctcagcctcccaaagtgctgggattacaggcgtgagccactgtgcctggcagggagtcttatagaagctgtcgtggacaatgtgggaagtagtgagcctttgtattccagtatgctgggctccactgtgcttgctctggcccccggtcgctctctgtgtgttattgagtccccatccacggccatactcttcgtcctgcttctctccttaccatcctctccccgctagtggtaccacggctaccactagcaattactgacatgtgggatcttagggctacttccctataaggctgcagggcatgtggtgttggctacgcgcatggtaaccatggtagccctgtggttctccacatgtgcgccttgtgacctgggattggctgcagactagtaataaactgcgtcttctggtatggaatctgtctgtagttgtactttctacctctgtatttaaggggagatctgtaacctaccaatgccagttgaagaggatggatgatagagatgttaacaaacagctgaaaaactaactacaatggcctgcaaaatagaacagcaggtttttgtggcaaaactttgtgtccatgagtttgttttttaaatatcctcatataatctgttttaaatcgagaggctttgggtaaaagccatggctagtcttacatgtcatggagtacctagcttgtgaggttcacagtttattatttacagagtgtccccttaaatcttctttgggtcggttcagcgaatgttgctcagatggacttttttggctgacatagagtcaaaatggtaatcaagcatgaaagtacagacagtccttaacgcacaaatgtgtcatgcttgaaaagttggaaagttggttctctggagctctgattgtattgtcctgtagaatccgtgttgtgaatggtggttaaatcccaaatgagtccgtagaacctatataatctgcaatatacctgcagtattccaattaatatgtaattcccccatagaactatgttaatgatttgtatgtatggtatttaatattatacataataatgattgtatgaataaaaaacattctgggctccatgtggatgatggggtgtgtgtgtgtgtctgtctatgtgtgggtgggtgtgtgttcatagatcccttttcctgcaatcctggcactggaattggttttatcatttccaattaagtttcattcccatgaattttggagtacagactgggtccaggtatgcagggcatagattagagccctgagaaataggattaggctggaattgctgggttggagatcagtagcttccaggaacactttttgggcctggctgtcttcattatccccttttgttttctcctggggtctgcaggtattgccctgttttgttcctctaatatcactttttttttttttctgcttttgaccagggtttttgcctctggtctacaactgaatatcctatcagactctcctgattttgaaataaatatatagtttttttgaggtgttctagcgaatttctaaatctaaatgttgtggcagagttattacatactaattttgctatgagaggttgtagaatcccagatgactaatcttgtaaaccatacacgcatttccatctaattctccattgtatatcatgttgcagaaaataacagcctctagagtttacattgcctcctttgactatatttcttatttaagattagttttcagataagaccttttcatggcagtacataactgtacagagggcttccaacttgtcttgggagctctcatctctgggagacatcacattacccactgccccctgccccccgcccccagcctggatgcactcagcctgtaccccatttctgtcctcagccaaacactgctgaaatgcaagagctttcaattgctagccagtgaagatgcagactaagggatttccatgtagaagcccgctcttttcagctggctcgtcgagagctggaggccccttgcttgttcacatgaggctttttgtccctgacttggtggctgctgtttcacttctcagcagaaagggacacccttgcccccccccagaaaggaagatttgatgtaccacttccgaaaggttcagtcgggcatcactgtaaccaagaagataggtcaggtgaggctggaggtggaacagggctgctcgctagaactccagattgttccacaagtgccttctggcagagaatgatggaagcttccgtgatttttttttctccttaatagttatgagcacagaagaggagcagattgtctggctatagaagctgtcttattttttatttttgtttttgagatggagtctttctctcttgcccaggctaaagtgcaatggcgcgatctcggctcactgcaacctccgcctcccgagttcaagcgattctcctgcctcagcctcctgagtagctgggaattacaggcatgcgccaccatgccagactgatttttgtattagagacagggtttcaccatgttggtcagtctggtttcgaactcctgacctcaagatctgcccacctcagcctcccaaagtgttgggattacaggtgttagccactgcacccggccgaagctgtcatattaaatagcactttctgcttttagcaaatttaatccaaatgagactttagattttcttgctctgacttaccagcagttccttgaaacacatttaattatttttgccagaaaatcactcaagcacttacgccatttttttaccgtgaaaatatgctgcattattttaaaatatattagaagtcagtaaccataagattttatatgttttctaatgtattctgtaagctttctgctgcttttgtttggaaggtgtattttgtaacgtagaggactgctttatctgcttgtaagcttgatttttgtttttactgtaatttttttttcttttgctgtattgagaaatacattgagtaattataaagtcagtggcatgtttataagttaatatttgtatctattccttagttactctaactcaaaacctaaagtaatcttcaactctaatttactctgacatccagttgactgccaagtcctccaacttaatccttatccttttttttttaaagagatgcagtcttgctttgtcacccaggctggagtgcagtggtgcaatcatagcttactgtaacctcaaattcctgggctcaaatgatcctcccacgtcagcctctggagtagctggggctacaggctcttgctaccatgcccagctaactttttatttttattttttatagagacagagtctcactgttgctcaggctggccttgaactcctgccttcaggcggaactcctgccttcaggcggaactcctgccttcaggcggtcctcctgcattggcctcccaaagtgctggaattacaggcccaattttattcttgggatgtatgtctgaaactctttccttcacttccttcccaagccttagttcaggcccttctcatctgtggtcttcaaagtcgccttcagctggttcaggtccttcctttctgctgtatctttcatgggaggacatgttatgtatcactgtcctacttgaaaacttccattccccattgatgagggtgttacctccagattcctaacacaggtgctgaaggcatgcctggataaaggcactcccttgatctcctggccaggtccccgtacacctgcagcgcatgctccacattctgtctttactgatgctgtgtcttctgcctgcggagccacccaccattctattcacagcccctgcctcagcggagcacgtgcctccctcttcctacactgagctgtcctttctattgaatcccctcttttttgtagtatgggaaatattttattatgaatactcttttctctgttgcctccgtgaccacgttaactttgccctaattcgccttaggactccatctgcttaggggaaagttaggatttggttacagaaagcaagctgctagaaagaacagtgtttagcttctgacaggcaaaataggattttgcaacatgcttttcctttttaatgcttagacattttatatgaattaatatttttatttggttgcttatacattactttctttttagctagaatgtgaaccctataggaacatggggattgcctttcacatctttgtatcctcagtacctaatgttcagtcaccctgtggtcttgtgtcgtatatacatttagccttccttaattaaaccatatgtactggtccccgtcccccacccccaaatagagagaaagaaattccttgaatactacattgccagtatcaaaccacaccttgatatcctctggggaaagggaggtatcagttgaaaagagaaaagaggttaaaatctaggcattaaaatgtgtaaggcttagatgctggcaatttaaggtatgttttcctgaggttaattttgattgtgtgcaaattttacctcatatctaactgtaggatttagtcaccacataagatgggatacctccataaatccttcagaaatgtttgtgaaattaaataaagccttattgaagactcagctcttgagagtcatctacctacctaacagttattcttgaacagaagagtcttacttttccctataaggcagtgtgatagccatctgtatattcatataatttatgttggcgcttacttcatttaaaaatgtattccgtgaatgcagttgccaggcggtgtgctgatcagaaacgtgtaccaatggcctcttttataattataagaggaagaccaacctgaaacagtcacacaaatgattaattttaattgtggaggagtgctgggaaagaaaaataaaagatgcaatgcaagtgtttacaaaggagctttgagcttgtttgaagtggtccttgggcacttaagcaaggcttaaagaatgatgtgattagaagtggcttagcaattctaaagaacacagggaaggcgtgtggccagaacattggtccctagagcacatcgcctcctgacataccatttccttaagttaatgttttaccactatacataggccctcccctttgtttacccagatttttttaattttaaggatgtttttaataacttagaatcctgtaatttgttgaacagtcctgtattccctttacttatattccttgagattttataaaatattttttacatgtcccaagtcttgattatatctttttacctcttgttaagaaatacttacttttctatttttatgctatatttcatgtttactgtagaaaacaaaaaaagtaaaatttttctttattcctatcactgcagcttataagcactctaaacattttgatctatattttgccaatcatatattttagttaaaattgttgttgacataattgtagattcctgtgcagttgaaagaaataatacagagctggagcgcggtggctcacgcctgtaatcccagcactttgggaggccgaggcaggcagatcatgaggtcaggagtttgagaccagactggccaacatggcgaaaccctgtctctactaaaaatacaaaaattagctgggtgtggtggcgggcacctgtaatccccgctagttgggaggctgaggcaggagaatcgtttgaactccggaggcagaggttgcagtgagccgagatggtaccattccactccagcctgggcaacaagagcaagactgcatctcaaaaataataataataataataaataaactttaaaaataaaacagagagatcccatgtgcgctttgcctagttcccccatccactgcccataacattttgcagaactgcagtacagtatcacaaccacaatactgacattgatacagtctgctcatcttattcatatttccccagtgttactcgtatccacgtgtgtatgcattgtgttttcaatactcttttattataaagctgtttttaatgtgattcaattctaggttgttttgttctgccctcaaaaagcattccctctcctaatcatatctccgtcatacccttgtatgttttctttaaacctgttttaagaaagcagctacctgtaagagaaatgagattgaaaacagaattgccaatctgcttgtactttataagcctgttgattgtttagatacggtttagccagtttatagttaccctgggtgctgaaaggtatgctggatgatacctaaccaacagagaaccattgaatgccgttcaaaatggactgaagcatcagcaatgtctgaaaaaggcctgacagtaatgtacatgtcaaatggcccgtaatttaagcagagtagagtaagtagaagaataaacatggggaaagttccagcaacagaggaggctttgagcttttgctcttcatcttgagtggatgttgttctcaggtggtaataggccatcgagctttctccactggctgcctctctggggaacaaataaccgaaaagatactcagcaccctggttggtacataggtggtcagttgatttatacttcctggttttcagtgttgcttgaattttctaaatggaaacacagtacctttataatcagaaaacaatcccgagttttgatttgagggtgttgtaaaaagttaaaaaaaaaaaaaacagaaatgtgaaaaggaagttgtgttagagtatttggagttgagaaagcatgaaaaggacagaagagaagctggttgtcaggttgcatggggtagctacaagcacactgaccagaaagtcagctggaaaaaaaatgtagaaacaggagataaaacggccaaggggctatacaagcaaacagcaaggacctgagaagaaaaactagttaggtgtgactgtcagagtgatgtgtacagtgtgatcctttctgtgtaaaaacaagcagtaagaattcgctgtttacgtttgcgtgtgtttggagaagagtggggaagagtaggcactgccagactgtgaacactggttaggttattgttatatctttgtattatatacactggacatgttatttgtataatatgagaagaaattttataaatcattaaatcttttggcatttaggaacatttgtgttttctaatagttgcttctatactattatctttattatatgcccttcatcttctcagtgtttggctgttgttgtgattcccttttgtgagcagtgttgaagttagctaatattcatttcttctcccttctttcaccctcctccagagtctgatttgaagtattcctagctgctacctataaaagcaataagcaagattgttttacttttcacaaactcgtcctgttctgtgcctctgcctcggacatagctgtagtatagagtgttgtctcccttacatccttctatcttagacctactagtaaatattaatgctcactctaagttcttctcaattcttttttttttttttttttttttttttgagaaagagtttcgctcttgttgcccaggctggagtgcaacggcacgatttcggctcaccgcaacctccaccttctgggtttaagcgactctcctgcctcagcctcctgagtagctgggattacagtcacgtgccaccacccctggcaaattttgtatttttagtagagacaaggtttcttccatgttggccaggctggtctcaaactcccgacctcaggtgatccacctgcctcagccttccaaagtgctgggattccaggcgtgagccaccgcgcccagcctcttctctcaattcttcctgaagctctttctgcactagattcctcaggaagggcttgtgggaacaatcttctgtgaatcaacagtacatattcataatagtttgtcagcagcctattattttaaggccatttggtctgtatataaaaatgtttggatcacattttctttctttaaggtaaatatgttattctgttgtcttctggtataaagcattgctgtaaatgtttgacagtctaattatcttttgcttataagtgacttagggttttttgtctatgtgcccaaaggattttttccctctttctctcttttttttttttttttttttttttaaacagacaggatctcaccctgttgcccaggctttagtgcagtgaggcagtcagagcttactgaagttttgaactcctgggcttgaggaacaaaggatttttttaaccttttaattcaaagtctaatcatttatgcaaccatgtcttggtgttggctgttttgggttgttctccctcaaaaatccatgtgctctttcaatatgtagttttaaatcttttttttttaatttcaggaaaatcttgaattagagttttccgtttttcgtctggtacattgcttgggtttccttcttcaggaactcagcctgttatgtgtatgtttgatcttctttgcctgtcgtctgtttctttcacttcctctcacttttttaaacttcatttattaaaaaaaaatttttttttcgagacagagtttcgctcttgttgcccaggctggagtgcaatggcgtgatctcggctcactgcaacctccgcctcccaggttcaagtgattctcctgcctcagtctcccaagtagctgggattacaggcatgcgccaccacgcccagctaattttttgtatttttagtagagacagggtttctccatgttggtcaggctggtcttgaactcctgacctcgtgatctgcccgcctcagcctcccaaagtgctgggattacaggcgtgagccactgtgcccagccttattaaaaattttaaaaacatacatttaaacttaacagaaaaattatgagagagaagggggtggtgccaggcttttttaaacaaccagctcttacatgaactcatagagtgataactcattaccatgaggacggcatcaagccgttcatgaaggatctggccccgtgacccagacacctcctactaggtccatttttaacattggggatcacatttcaacgtgagatttggagggggcaaaactacaaaccatgtcactcagggattggaggagcaagtaccacctatactttggactcaggtagaaaggcaaaatatccaggaaataagctgctaccgtccagggttcagcagaggtgcccatcagcctgccaagtactcaagagtccagcctctagggagctaatcatcatggtgagctcttcgaggcacagggagctgggaagacagtgcttgccacccctgcctgaatagtgtttgcacagagagttctgttgtgtcttgattgggtcctcctgccactgggaatgctgtggattatactaggtctctatctggcttgtttcagggctccatgtgaaaaccttcttgatatcctagccatccacctgctcagtccctagtttgcaaggaggctgtggggagcctagattctgtgtcagatagaatgtactacattccgtctcaggaatgtaccacatcagaaaacagtgcgacctgcaggagaagtagaggtgaagaggcacattcttccgagaaatgtttctctcaacacccagcattccctggatatcagcaggaaattactcactgctagaaaatgccccatgagccttctgttaaggaggtcaagggagagaacagagaaagttctcaaagttgacttggtcactggtactttcttatgcggttcttattttgtttgccatcgtcatcatcatgctatgtctattttctcaatccaaatccactgctttcaccttggttctttctgaccggtttggcacactcattcagtaaatccttatggagagcccaatgtctgcataattgtgctgtgctgatgaccaagctagacctacgagtgtcggctcctttgagatgtacgggacagctcttctgtcatctcttctgggaagcctctccaggcttggtgaacagtggcaagatgtttaacagttgtacatgtgtcccatgttcctttctaagagcctgggcaaaccagacccggtcgcaggtcatcgtagtatggcgtgagcttcctctctcctttctgaccttttgtgtgatggcaagaacctgcagagtgacacaagcagcaggcttctgaggttgctctagcctcagaatggccgtcccttctccaccctggccctcattgctgaggtttcctttgaagcaacagtgccggaacagactaggggaagcagcttggacatagctgtatgatttattaccacccattgaggccaaccaaagtcggcaaggagaggtagcaggtcagtggtgcctggaagcttcctctttcctttgcaccagatgtgactgctctgcaattactcctaaatttgctactctcgtttttactagccaaccttgatgtttttcccttcttcctgtagaatagacttcccctctgatcagtactttctactcaacactatttgtggccacagtgggaactcattgaggacagggaccatgacattactacctgacccatcaacacttggcataacttgaaatgcaaggacaaaaattggctgcaagtacaatgtggtcttcactctgaaggtgatccttaaaacttggctttggcatcatattgccttaatatacctaggggattgggtaaaaccagttactttaaaagagttttacaattctggccttctagctatcttgtcttcttaaacaagagcacaagatgaatgtatcttagtgaaattttatatggtttgctttgagtaatcttgcgaagattgatttttagcacagtaggaaagacacattctaatagtgatttttttccccgagtttatgtactgctgttgcatgaaaatctgactagatttaatgttcctaaagttctttgttcatcctgatttttgcaggtcctagggaaagctttgttttcctcttaacctaacttagatgttgtcatttcatgagctttggaggaagagtgtatagccaattgtgtaatgtctttaaaggatattatctctgcaatagttgtttataaggcctaagttattcatgtaataatagtggccccggatctgtttctagcaataggtatatggattttggttcctatatagttgtagttgtggctttgagatattgagcaagcccttttaagaaaggatttggcatccctcagccttcaaaagcttctcaaaattgatcatatgttattagcaaaggtttactgcctgcttccattgtatagacaatttattttttatgtattccgttctaagaaggcagatgaccaaaagatcttgcatctgttgcccaaggcttgtgactagagaggaaagagataagaatacttttttaaaatcccattttactaaatatgttgaggaagtggtaagatatattaatttgttgagatttttctgttatgcctattatatgaaataggtactctgaacatggcttcttaattaaatatatttgataaaatacaacttgcttcccctggagtttagaagtcagataactgccatggagagctatgctttctttgttttaaagatctgcttatgaacatgataaacaggaacaatttaatgttttcaatattttcttgtattttactgcaagtttatacacaacataaatatgggggaagggggaaatgtttataccagagccatcctgcccattctttccttacagaaggacaaaggagcagtatttattttaactacaaaaatactattgtaggttttaaaaattccgtatattttgatatcttgtgttcctcttgacctttaatttgctaaatagttgcaaagaatgaaggtaacctgcatcatcttcttaaaaaccaactctatctaattataatagtttgtctatctctgaaaaatagtgatgtgttcattctgaaatcagaactaccggatgcagctgcattttgttactatttgaatttcgggagagggaggaggatgcagcctttcgagctgctgaaatacacaaacacaaagaagacaccaagcatagtagaactgtgttaagctgaccaagccagaagaagcacctattctcagcatagtatgagacgtaaaggcaatataatgggcatagttgaagatggtagaaggaaaatagactctgatggtttaatgttaaatgctttttttaaaaaagtggtattccaatatcgaagaagaagactttctacttttagaagcaataaaggaaattgcagaggaaagggtcaataggttggaatacataaaaattaaaaacttttaaactttttttttttgagacagagtctcactctgtcacccaggctggagtgcaatggtgcaatctcggctcgctacaacctccgcttcctgagttcaagcaattctcctgcctcagcctcccgagtagctgggattacaggcatgggccaccactcctggctaatatttgtatttttagtagagacagggtttcaccatgttgtccaggctgatctcaaactcctgacctcgtgatccgcctgcctcggcctcccaaagtgctgggattacaggcatgagccaccgcgcctggactaaattgtttcagtattaattttttttaaaacaagatcttactgttgcccaggctgaagtacagtggcccaatcatggctaactgcagccttgacttctgggcctcaagggatcctcccacctcagcgtcccgagtagctgggaccacagacatgtaccaccacacccagctacttgttttatttttatttttgtagagatgaggtttcaccatgttgcccaggctggtctcgaactcctgggcccaagcaatcctcctcccttggcctcccaaagtgctggtattacaggtgtaagccattgcgccctgcctgattttttaaatgtgcaaacagataagttggaaaagtgatttccaataaagataaagagttgatggttttaaaatacgtaaagagcttatatgaatgagaaaaacactaacattccaaaagattagaaggcaaaggacagaaagaaacaaatcactatgtctgggaagggacatgaaggagcaggttcccactgggccagcggggctcaaacccactggggacgtccgagagactgcaagggccatgccttcacattgccgtacctgagaagcaaggagctggggtatttatctctttcacactttgggaggctgaggtgggcggatcacctgaggtcaggagttcgagactagcctggccaacacagtgaaaccccgtctctactaaaactagaaataattagctgggtgtggtggcacacacctgtaatcccagctacttggaaggctgaggcatgagaattgcttgagcccaggaggtagaggctgcagtgagcataaattgcaccactgcactccagcctgggtgaaactctgtctcaaaaagtaataataatcatgataaataaaataacattagattgttagcagaagtagccacaggtttctcccacctctctgcaagttgctgagtgtgattcccatcaagaggtacaatgtctttttatttttattttatttattttatttatattgcctatgttgtctaggctggttccaaactcctgagctcaagtgatccttctacgtcagccccccaaagtgttgggattacaggcatcagccactgcacctggcccagatactttttcttgagtaggaatttcgagtcaccctgaacattgcatgccttcgtagtggggaagacaataggaaaccacaggctgtaggctaaaatgggttgtgtttcttgtaacgtcatgacaaggcataacccatcttggcatagtaaatagtaagcactcactgaactgatgattttaaatctttgctgtttattcagcaatatcctaaattagcgctatgttagtggagttgcatctccctcatggattagtctgaaaaagatgagaaatctgtatgtagaccaagttatccttaaactgctcataatgtatgatgcacgtggttttacgtgtacagcctggtaccattgttcttaggcacatttcagtgccagaactcttaatactcaggaagaagcaaaaagaaagatggaggtgcagctagaggttgtggcctttgaacgattcattctgccttaataagagtggtctggctgagctcggtggctcacacctgtaatcccagcactttgggaggccaaggcaggcagatcgcttgagcccaggagttcaagaccagcccaggcagcatagcgagaccccccctccccccgtctctacaaaaaaatagaaacaatgagccaggcatggtggaacgtagtgcgtggtgcctgtagtctcagctacccagttggctgaggtgggaggatcacctgagccctagaagtcgaggcttcagtgagcccttattgtgccactgcactccactctaggtgacagagcgagacaggtcctgtctcgaaaagaaagaagaagaattaaaaaaagtgattagatcccttgtgtttgggacacttgttggcagcagggatggtagcgtttatgagggttgcatgtaacatcgcctagctcagacatctgtttgactgtcttcccccctgaagcgcaggctctgtgagggcaggtcttttgtctttcttgttaatcttcatatgcttagtgcttgccacatagttgatgctcagtcgatatttggatgaattgaagggattaatgcattgaatctgaaccttgctttcttaatgcatatggggagttctttggaaagccacacagaggagcttggttgcctgcttcctctcttccccagattgtctttttattgttgtggcttcactgaagcactctcacttcaaataattttgggcattggtcgtattttattctttgttccttcttcatccttacccctcagatggtatgtagaaaagtacactacatctagaaagtactttataaactcatttggttgataataatacatatgccttttccttggtcctggtagcagaatcttgtgccactcttggaatacaaacgaaattcttaaccaaagccagtttcattttgatgttctattttcctcccattcacactccaaattgtgcaccaaagtatcatcctagttttgtgaggatggttctccatacttcagggtaggagtatcatgtggattcctatgatacctttctccctgggaccatggagggcagcagctggtgattgatagtctgattcccggtgaggaaagctgtgagccttccacttgcagatgtctgccaactacatgtgtccttagtcaactgtaccactgtcctccggcaaacagcagaagcccagggcctgaagttcttaagctgtcattatggaaagcagaaggtaaacaaaacagaagtgaaagtagatttaattttttagactgttctcttacaggaatggttttgtggttctcagcattttaaaaaaaatagtggttccaatatgttttattgacatcaattactgtaagtctgattcattttctgcctattgatttctacccaaggtgaaattcatgacatttaacagaaagcataagtgattttttaaaagcagacactattagggacggtaaaaataagatttaaagtcgggacacttgaaaaagcaatttttatacctttggtaacgattctattctgattctttgtataaataatataaacaaaggctctagaagcttactataatgaagttggtgtgctgtttctaaattctggtttaaggcccaaattcattttatctgcattaacttttttttttttgagagtctcgctctgtcacccaggctagagtgcaatggtatgatctcggctcactgcaacctctgcctcccgggttcaagcgattctcctgcctcagcctcccgagtagctgggattataggtgtgcgccaccacgcccggctaatttttgtatttttagtagagacggggtttcactatgctggtcaggctggtctcaaactcctgaccttgtgatccgcctgcctcggcctcccaaagtgctgggattacaggcgtgagccactgcacccggccgtgttaaaatttttcagtggtagaccactatgtcaatatgttgctttcactgacaacagtattttcttaaagataggataccccatttctagatgaatctcattctagctggaaaataatttttcagttctgaaactacatcaggcctcagggaatcaaaactagctattagccacacacatataaagtggctttgctttataaacgatttagggtcaccatcaatgacaatggtccctttttattgtatttttaagagtttcttatcttaaatggctgcataactgtagagttttaaaaaaattaagtaaatgaccatgttaatgctctattaagcttccaaacaatattgtaatttactttgaagatttttttttattctcaacatcctgcagcttgaccgtttgcctccgtgtctcagtgctgcttattttgaggtgtggactggagtccatctgtcccccttgcctctgaactgctccgttttgtgtttcgtaattcttcatgctgcatcctgggcgcatttctctgtagtagctttcaatttgctcatgctttgactgggcttagtctagcgtttatcctatctcttaaggttttttaaaaaattttcatgattattcatttatttccaggatttctcatttcttcagtcacatctccttgttctggttttacttcttcctgtttttattcataacatcttttttatacacgattccttcatgtatttctaatcttaagtatatttaattgcttatttgattcttttttttttttattgagacagggtcttactctgccaccaggccggagtgcagtgacatagtcatagctcactgcagcctcaactacttggactcaagcgaccttcccacctcagcctcccaggtagctaggaatacaggtgtgagagccgccacacccagctgatttgtcttactatgttgcccaggctggtcttgaattcctgggctcatgtgatctgcccttcttggcctcctgaagtgctgagattataggtgtgaaccactgcacctggccaagtatgtttatttatttattctaatttgagagggagtctcgctctgtcgtgcccaggctgtagtgcagtggcacaatcccagctcactgcaacctctgcctcctgggttcatgcgattctcttgcctcagcctcctgagtacctggggttacagttgcgtgccaccacacctagctaatttttgtgtttttagtacaggcggggttttaccctgttggccaggctggtcttgaacttgtgacctgaagtgatccgcccgccttggcctcccaaagtgctgggattacaggcatgagccaccacgcttggcccaagtatgtttatttttaaagtccccaacaagctatacaataaattgcatatggaatggatttttgttctagttgatttgttggttatcatttgtagaactaactagttgtcttctgtgtttgataccttgcttctaggtcattttgagttgggagccttttgttttgtttttattctcatgctgtttttgagcctagctgtgcctttatggttttctctaaatttaattgaccattgttttatatttggagcagtgggtgtacatcagagtgtgaaagcagccccaccctctccaccagaaggtctccatgccagtttcacgaagcatttttcatgccctcattcctgcccttatcccttgatttgtggggagtttgtaaagcagttgattgttttttttccacgtagttttccaagtgcacataattgttctgttagtgacttgtagctccattatctattaaccttgccccagaccactgtacaagcggacccaacgcttcctccagctgtggcagggacagttacttggtatcctgctgccttttcaatgctgaccagttttgccccttcctcccctcaacccctgtctttcattcaactatcaccaaaccaaaagattctggtttgctttttagtatgtgttcttattcagtacatagtcattttaaaatttaaaccaaaacagacttggtactgattagcttaattttaagctttttctttattattaaacagtgtagtttatcttagcatttcatattaagtatatgatttatttcatattgcttatatgaatgtacacataaatataataaaaatattttcctaaggtttttgtagtaaattatatcgtttcattaactttcatatatagcattgcttttgacctggaagacattgaacctctgatgatttgtatattcctcggagtatactttgttacatagaaattttctcatttataatgagatttgtgattaacaaaatttgttcaacatgcattactttgaagatctggtttctaaaattttatgctagttaccccacccccccttctatatatatctccctattcagcgactactgcaagagttccaggaaatgtacactgtgtgttcacttactgcattttaaatcattgcctttactatatttctgcatttcccttcaatctagctctgtctgtacatttctgaaagccagtagcttccctgaagaaccaggtaacaacccgaacaatcaaattagataaccatttgtagaatggaggttccgggagatcttagaagatgtgatgggtgctaagggactttgtagttccctgaagttccagtgagtaaaaggtacccttggaattttttattccttcagacttttaaaacagagatcactttcaaaaattactctttctgctttgaatccatgttttagtaactattttgacactgtttggtcagaaggctgtgtgggtcaactgcaaataaataaaataaatgtgatttcagtaatttccattttgtaacaagtaattgagaaaataggattggatcagatatttgcttatacacattccctttcaggagcacttctgttctataaagaatgttggtatattgttaaggacacttcaagctttgggaacctttgaagtatccattgattcagttaacaaaattatgttgagtgcctaccctgggcctgggcctgtgttaggaggggacactaagatgagagtccaaagcacttcttctcagactcctggctgctaatgggttgctgcctctacttcttcacttagcagatagctttaaaatgagtaatgcattttaccatggagcccgtaagagacattcacccagttgtggaccgaggagaagggtgttaaacccagattgtgatgtttcacttgatgaagtgcttaatataaacatggaaatatttccgcaaggataaactggcttttatgcctgtgtgttttcaggagaaatagaaatctctaatcaaatattgccagcttttcacccaagtttgactttttgcctaattgagtttgggaggtgtctgaataatggataatgagctttcctgaataaatataaaaattaattaactccaggctctaattcattctgttaccagagttttgtaagcatgttacccctttgtgttcattgggagatcatctgttaccttcttaaatgagtggggaaggatgggaaatgaggaagagctataaaaactattcaggtgaagaaggtttctgcccctccttgccccttttaaaatctccagctcagcagatgctttgtttaaacttgatcaagtgcttgtgaatcttcctagcctagctaaatcataactttggaaggacttgcttttttctctcatgacaatggtttaccacagaaatgattcagatcactttgtgtgcctgatgcctatgtaaaatgatacagtgaaatggaaaccatttacctgtaagctttgggcacacccaagcctgcttcaggagcacatgatcaggcgtgcactctgggagagccgtacacatttgacatctatgatgtgtggcgttttattctatcacatttctgaaatctacactaagagaaaggaggctcttaaaaaaccactgaggtgtggactgggggaaggagagatccgtaaagaacctgtttgttacctgttgatactatttcccattggtaaaatttctaatttagtgtgatccagccctgaaatgctgaggcacacactgaatgactcctgacatctttagtgtttttgttcaggggactcttctgggaatctgtttcatggcaagtttattattcccttttggtttggctcatcagtttacccagcagtcatcttaatcggttttaaaggcttttattttattttgttttctctgtggaaattttacacattcagtagattagaagtagttatttaatctttggttagcataataaaagatcttctagggacattttttgcttgcagtggaaggctagttaaatgtgttcattagtcatgaatctgctttttctatagctgttggaaacgtagctcccctgtgatacagttgtagaatacagaaatctcgttttgctgttacggtacggtagtctacttactttcttccaaaccattaatgttatagttacctttaattgcgtaggtcctatcacccctcaattttaagactctaagcctggcattttatcttacaaaatgaaatataaagacttgtactcagagtatgtgtgtgttttccatataccattctaaagtagagaaagatgagggattcgccagaaactgatttctaataaattatccagaaactgaccccttctcacctcttctgttactgtcactgtggtttcagccacagcatcctttgctgcattgttaccttagtttcctgactgtatccttccttacaccattgatccctgcaatcccatctgcgcgtagcagccagaagggatccacttactgctgtgatcagaaatcctcagccaggtgcagtggctcatgcctgtaatctcagcactatgggaggctgagactggagaattatttgagcccaggagtttgagaccagcctcaaactgggtaatataatgagacctcatctctacaaacaggaaaaaaaaaattttttttttttttttaactagccaggtatagtgctaatatacctgttctgggatccagcatgctctccctgacctgcagcttcatctccaccactttgcccctcactcccaccacaatggctttcttctcttcctcagacatgccgtgcgtcctcctacctggaatattcccctccaaacattcccatggctcactccctcaccttcatcagatctctgttccagtgtcacttttactggaaggtcttttgtgaccatcctacttattataaaaaaataatctgcccaaccttctccttttatttcctctacttgatttttcaatttagtacttatcagctgacatatattttgtctctctgtctctctctgtctctcatagaaggtaaattctataaaggaaggaatttttatgtttggttctttgctgtagctccaatattcaaaacagtgcctgacacacagtaggccctttatatttgttgaataaatgttgacactctgatatctaatttttgtctggtgactaatacgaaaactatagagtgataataaaagcattaccttagtagactggaaagggatgagcgctaggatgaactttctgcctggcgatcttgctgaatttaggaggcagattggggttcaaaggaggctgaaatggctaggatttgcagagcagggtactaaggatgagcaggctatgacagaaagaactccagaaatctgcaaagggatcaccttgagtctggctggatacagtgtacactttgtagggtgtctcttcatgagcttggataaagaacaactgttggggagtggataattcccagcactcattcaagcttgcatcggccagaacggagagagacagacctctgtaatacgtaggatatttggtagaaacattcaaccgaaaaccatcagatatgcaaaaagtaataataataagtaaacaatgtgatgcatagctagaagaaaaatcagacattagaagcaagcccagaaatgacagatgataaattagcagataaggacattaaaacagctattataaataacttagcagatttaaagaaaaacaacataatgaggataatggaagaaaaacaaccgaataccatttctaaagaagaaaaatacaatatctgaaatgagaatttagctggataggattaatagtttaggcactgcagaagaaaaaaacagcatctatatgagaatatacccaagggaagtacagagaggaaaaaaatgtggattggggggtgcctcagtgacatatggaacaatattaaacaagtctgcccccaaaatacttgaaggaataaggttcaagttttttccaggtttaatgaaaactataagcctacagattcaagcatttcaacaaaccttcagcaaaataaacaaaaccacagtaggcctggcacactgtctcatgcctgcaatcccagcactttgggagcctgagtcaggaggattgcttgagatctgcttgggcaacatagccagaccctgtctctacaaaaaataaaatgaaataaattagctggatgtggaggtccacacctgtaactctagctagcctggaggctaagaagggaggattgcctgagcccagtagttcaaggctggagtgagctaggactgcatcactgcactccagcctaggcaacagcaagaccacatctctctctctctctctctctctctctcaaaaggcagtgaaataacgacttatttggggaaaaaataaaggcagagaatttgttgccagcagactagcataaaaaaaaggaagtccttgaaacagaagagaaatgataaaagatggaaatttggatatatactaaagaatgaggattgctaaaagtgacatacatagataaatatgaaatatatttttattttaaaatttatttaaagcaaaaataaaaatacatcatatttataacatagaaataaaaaatgtatgataatagcataaaggataagtggacaaatgctgttgtcgtatttttggtaaaatgcactattatttgaaagtagaccatcgtgaattcgatgcatattgtaaaccaaatagaacactaaaaaatgaaaataaagagatatggctaatgtgccaatggtggagataagatagatgcaaaaaaagaaaaacattcaaaagaaggcagagacagaggaaaaaaggaacaaagatcaaatgagtcaaatagaaagcagctaaactagcaatatggcagatttaaatctagccatgtcaatagttatattaaatgtaaatgttctaaatacctgaattaaaggatgaagattgtcagattagattgaaaaagcatgacccaactacatgctgtctgtaagaaattagaaaaagaacaaattaaatccaaagtaagaagaaaggaaatagagtagaagttagtgaagtataaaacaaagagcaaagaaaatcaattaaatgaaaagctggttctttgtaaagatcagtaaaattgataaatttctagctaaactggccaagaaaaaagaaaagacatacaaattaacagtatcaggaagaaaaacagagaattcaaaggagtgtaatgcaaactttatgctagtaaatgcaataagttagatggtatggaaaaaaatgtgaacaatacaaagcagactgtggttgcctttggtggcagtagcggggtgggagtggaaggttgaattgactggaaccagaagcacaagtgaactttttggggtgatggaaatgttttgtatcttggttgcattgatagttaaatggttgtagacattgcttaaaactcactgaacacttaagtgggtatgttttattatttgtaaaatatacctcaaaagcagttttaaaaatgtattcaagtacatacttaagatctttgcattttactctgagtataccttaattttaaaatctgttttttaaaaagtattatgtagataccttttattttcccaatgtctttattaaatgacatctccacgttttgcttcttacctctatttttttttttttatttctctgtctctcaggcatgcacacacacacaccaaaaaaagtacatatgcataatccttttggctgaataaaatcagttgcaactgttatttcggcccttatttgctccgggtaaatattcgttagctgagtggtttatctgtatcagatatttcttacatcttcatccagtcacaccagctggactgaccagattgtttttcacttcaagggcagaatttgtactcactgctgaatgcttccaaatgatacgtagaataacaaatttaagacttagatttttactttttcaggtctttttttttttttctgtgctgtatagcatttccctgaaagcttaatctcatctgtaagtgatgcagtggatgtgttactattggattaatttatttactcttaggtaggtttgtaatctgtcatcatgctgttgtttttttgtgtgggtttgtttttggttttgagacagggtctcactctgctgcccaggctggagaggctagagtgcagtgatgtgtttatgggtcactgcagattcaatctcctgggctcaagtgatcttcctgcctcaaccccttgtgtagatggaagcacaggtgcacgccaccacacccggctatttttttaaatgtattgtagagacgaggcatcatttttttgcccaaggctgatcttgaactcctgggctcaaacaatcctcccacctcggctcccaaagtgctgggattacagatgtgaaccaccactcgagctccatcattctgttattagttgttctctagtatgagtcaaaaactcttacctgcccttttacagttttataaataagtaagcagaatagcagaatgtggacattttttaaatccaaattgaatatgcacatgactcaaggagtcaaatagtaccgtaatcggtttatgataaaatccagtggtttggctgggtgtcgtggctcacacttgtaatcccagcaccttgggaggctgaggcaggtggatcacctgaagtcaggagtttgagaccagtctgacctacatggtgaaactactaaaatacaaaattagctgggcatggtggtgcatgcctgtaatcccagctacttgggaggctgaggcaggagaattgcttcaacccgggaggcagaggttgtggtgagccgatatcgcattatttcagaacaattttccacaagatcagtgagtgctgtccaatagacatataatacaacccacatacatgactttacattttcttgtagccatagtagaaaaggtcaaaagaagcagatgaaattaatagcctgggcaacaagagcaaaaccccatcttttaaaaaataaaataaaatatggtggtttgctgtccccacctcagaccatttctctggtctttctcattgaccaccactcccaatctttgttctgctgattgattacagcttgtatatatctccatatttctaagcaaaatgtttatcttttttaaatttataaattctttttattatttttcagagacagggtcttaactctgtcgcccaggctggagtacagtggcaccatcgtagctcactgtagcctcgaactcctgggctcaagcagtcttcctgcctccgcctctcaggtagctgagactacgctacaggcacataccaccatgcccagctcaaaatgtttatcttttgatacattattcgagaccattattaaggtggatgatttagttttcttaaacagccatcccctttcttttcctcccctctgcttcaccgcccccattttcccaatgttttaccttttggttaaatcagtactcattgtttacattatttgcctctgcacatagtcacagatagtattgtactgtactgtactgtgtttcttttttaaacattatttctgttgttaataattgactttttaatttttttcctattttgttttttaaagagatggggtcttactatattgcccaggctagagttcagtggctcttcgcgggcatgatcccactgctgatcagtacaggaatttccacctgctccatttccaacctggaccagttcaccccttcttaggcaacctggtggtcccccattcccgggaggtcagcatattgatgccaaacttagtgcggacacccgatcggcataacgcatgcagcccaggactcctgggctcaagcagtcctcccgggctcaagcagtcctcccacctaagcctcccgcgtagctgagactacagacacttgccaccacaccaggttaatttttgtgttttttgtagaggtggggttttgccatgttgtccagactcatctcaaacttctcagctcaagtgagcctcctgcctcagcttcccaagtagctgggattatagacgcatgccaccacaccccatgataattgcctttttttttaatttgcataattttctttgtagcttttgctaatgttcccatatcttcttatagccttacagaatgattttccacaagatcagtgagtgctgtccagtagacatataatacaacccacatacatgattttacctttttttgtagccatagtaaaaaaggtcaaaagaagcagatgaaattaatagtatcttttacttaacccagttcattcaaaatgttatttcaataaatggtcaatatttaaaatacttgagatattttgcttttatttatttcttttgttactaagtcttcaaaatccaatgtgtattttacacttacagaacatctctttttagactggccacatgtagctcagggttactgtattggacagagtggtttcagtttcaagtttttccttggagacatcctacttgaaatttccattctccatgtatctgggtggttggtctatagacttgccactcacagctgtcatcttgagactttctttgcttttcttctctattggatattcagtttcctggatttcaggtcttctcattttcctctagtagttttgttaggtcatggttggtatggcatggttgggatagcgtgttcacacagctatctcgtgagtcatactcctccaatccagcctgctcgcttcccgtgtctgtcatgtagttgtcaccctgctatctctccctccagtttttgcagaaatttcctttgtcttcactcttggtcttcctctcccatcccccatgtatcctatatctttctctttcttggtttatttcatcactcaggtggaaaagatgctccagtggattactgggaaaagggggagcatggatgataaaggtattgagaccttacacgtcagggaatttttttttttttttttttttttgagacggagttttgctcttgtccaggttggagtgcagtggcgccaactcggctcactgcaacctccacctcctgggttcaagtgattctcctgcctcagcctcctgagtagctgggattacaggtgcccgccaccacgcccagctaattttttgtatttttaatagagacgaggtttcactgtgttggccaggctggtcttgaactcctacttcaggcaatccacccacctcggaatgtttttattgtcccttctcatttcatgactgctgggctaggtatagaattccagaatcattgttcttagaatctcgaaggcattgcttcattgctggccagctttcagtgttcttgcaaagtctgaagctgtgctaatcacctcatcctttgaaagtgaactgttttttcttcccagaaacttacagaacattctctttgtccgcagaattctgggattgcaattactgtgccttagaatgggtctgtttttatcattatgaagagtactggatgggtcgggaggttttcttgaattacttcttgatgttttctttccttgtatttttttgtttgctaattttctatttttttttcttggtttactttcttgggcagggggatttcttctacttatatttgattcttcagttgagcttgtcatttttgctatcttgtttttaagtttcgagagacatctttgttttatataacattctgttcttaatacatagatgcaagatcttttctttctgagtatattaatatgtatttgaaatctttctattctctgcagtttgtttcccccaagggtttttttttttttctggtttttgttttttgtttttatgttagagactttcctgttatatctggtcatcagtggtacctgcatgtggtggagagtaggggcttattggagtatgagaaccttgagcaggtgtaaggagcctgtcaacactgcgctggcctcagggcctctagggaggctgccagttgtgcattctgaggataccttttggttgtgccttttgtctggtcagattatctagagatgctctgcctcctacctggaggagaagggtctagctgccagcggtgtgagtgtctcttggggaaaaggactcgagttcctggtgtttggcttgtgtatggccgcttaccccatttttggtggagcgctcacatcttccactgtgccaacagtcttgctgcagttcatagaccttctggtttacatttttccagaaagtatgtctttagatttctgcagaagtctgaggagcatggaaggagcttggggaatgagatggcaatccaggtcttcccagatggctctacctttatcccctgcagggaatcccactcctccttcctgactgggagcacagccagagccttgggaggaatctggagtggaaatctcgggcggtctggctttcttactgttcacttgtaattttgctttctcacaactgccaaccactaatcagcctgatttccagcttccagaattctattgctgttgtctgctctcctattcccaccgtaggggatggggctgtctttttttttttttttaattttggtaaaacatacaaaacataaagtgttccattttagccatttttaggtacacagttcagtggcagtaagtacattcacgttgtgtgtatttgtttttttagtaataaacaatataaaattttttaagtaataaaacacaaataaaagattgtttaatgtgattatcgtggaattttaggtgtgatcaggagccatggtgtagtcttctgttgaaacagggtgataggatttgtttaccacctcctaggaaagcagttggatagtttgttggcataaaagtacattttatctatttttaataatcgtagctttatagaaattgcagttggaactcccaggcctggcattcaaggctctctgagatctgggctacccacccatgtcctccagccgtctgtcgcacctcctactgcccactcactgttcctggcatgagatgtgatctccagcccccatgcctttgctgtgcagggtgttccagagtgaattgtccctcctgtctgtctctctgccctcttcctcgtctttccatcttcctgccccacatcactgcctcctacccaaggcctgtgctcattcctcctcggttttcccccatggcctggtacatacctctgaattatcaccttgcatttcccatattgcccggctctctttgatgtctgtttctttgctgggtcttcctcagtgtctgacggtcagttaaatgtctttattcttttttgtaggatatccgacatgaagccagtgacttcccatgtagagtggccaagcttcctaagaacaaaaaccgaaataggtacagagacgtcagtccctgtaagtatccacgtggccggtaccagtcttgctcttcctttgctgcaggcctttttagtcaagactcctttcgcctcagggtttagtataataataaatcaatgtagcagaggtttatgacgcgattgtttcctatagtaaaggcattagagacttatagtaatagctcatttttccaccattatagaagggctcaggtttcagtttctggaaaattcagtgaagttcaaagcacttttcttaagctttgactgtttttgtgatgaatcattttcctaccagctgaagcagagtatagcaggcataataaaaccttttctggatgactcagcagcagcgtcattagggcatgagcactgtgttccgctgtaatgaagccccgcacaggcattcggggtgggcactgtcgtcccctgcgctgaatatgcaaggcagctctgtctggagtccccaccgcctccacccccgccaacctcatcatttttctccctctttcctgctgttagttcttcctaggattgtcagtgtgcctgctggcctgtggcagccctgtccgccttctgagtgattggctgtcagtctgccggtagctgaaaagtaaataacttaacatgttagaatttgcataaagtaaggaaaactggagctgagtacaggacttgaactgcgccatctcctctaggccacagaggcctttttgacccccttccaggtctttagacattgtcaggcagtgaggggtcgtagctgccagtgtctccatggtagcgtgctctgccagggatgcagaagattctccagtcattcctccagtgggcacttcctgcaggtcctgtgcccatggctgggagtggtggctgtcattgttctctgccagaagggttagcagtgcatcctgacctgacttatgtggcgcccagattcctggaaggggtctaaaaatggacctagacttggtgtagaacgtgtgcctcttggcctgccaccatggttccctgcctggttttgtgtgtcagctctgccgcttaagaactgagtggcttcgggcaagttgttctctctcataggagtgtgtgaagatgaagcaacataagctgcttagcccagcgcccagtacctcacgcagacataagtgctcagtaaatgttgtctgtggtggggatggttgtcaccaacatctgaagtgcacttctaggtcatcaggtgacatgattggcgccaacacatggtactcttgatttagcacatctcagctgaggcacctcattgatatttgtttaaaaacaaaaacaaaaaaccttggtgattctgctgtgaagtcctggccagaaacctccagaccgctgatcaacacgcaacagaaccatcaccgttcacctctttgacatggtgccaggataccctggatctctagcttttgctatagttgctctaattagggaataatcttgtctttaatattcctttgctacattttttaacatttcttatctaaatggttttatgaatcagttttacagagaaaaaaaaccagtatttaaaatattcttccaggggctggtccaagtacagtagtgtttacaactatgtgatcacaaccagttacagatttctttgttccttctccatccccactgctttacttgactagccaaaaaaaaaaaaaaaaaaagttattccagggaaacaattctccaactttttcactcccaatctcactcctcttatcttcctcccgtactcctatcctcctcccgtactcctatcctcctcccctactcctatcctccagtagaaacagtcatttgctgtgaaggttatgggggagaatgagtcaaggtagaaggtcacctgctgcccagctcacagtgctgctggtgatgacagcagtccacagttacaggcacttgctgaacgaggggctctgtatacacctcagctcattgactcttcccacaaccctcttgtcacctaccatttagcaaatgaaaaaaccaaggctctgaggtgagttgtttgcccagagtcacccagtgctgtttgaacccactcacataaccaaccaataccattacgtaatttttgaggtcttttatctctgtgatccacttaaaaattatccaagtatctttatttgtactaagcctccataatgagaaacagtgttccagatggtggctagttttcaaagacatctctctttggaattcttctttagaacaaaaagccccagaccacttatccccattcatatcccctttggacctagggagaaggtactatttataggtgatcacctgagtttattgtcccttgtgctgtgccagaaataaaggtccccacctgctcttattagctctactaacaggataaggaaagtggccctcagagagctactgcttttgtgacaaacaaatgatacaagaaaaaaaaagtggctttttaattttagtgacctggggcaggacttccaaatgaaagtttatttctaaaaactaaaaggtaaatttaatatactttcagtgtttgggcttaaattctctttcaagtgtctttgtgatatgctctgaattttaaaaatttagaatcattgaagttcattatacttgaactttaaaaaaaaaaaacaaaaacctcgtataaaggtcaaggtatgacttcatgctgctgtgtacttaggtcatttaatcttcaaaccactggatagaggttaggttgaagttcgatcttaaatcctacctactgtagctcattgtaccagcaacagctgtagggactaggtggaattcatggtgggttttgttcccttttaaagattgaagccaccatattttctgccctctaaaagtttatgtcagccaggcatgggtggctcacacttgtaatcccagcactttggggaggctgaggtgggtggatcacttgaggccaggagttcgagaccagcctggccaacatggtgaaaccccatctctactaaaaatagaaaaattaggtgagcatggtggcctgcgcctgtaatcccagctactcgggaggctgaggcaggagaaacatttgaatccgggagatggaggctgcagtgagctgagaacatgccactgcactccagcctgggtgacagagtgagactcttgactcaaaaaaaaaagttatgcatcagagaacagatcctttgatgccctcctctgccctgaaaggtttttgggggagagtaataagtatcacaacaagatatgacctgagaacagatttcccagataggacatgatccatgttttaatatggcttactgctgttgcttcatagtgtgaagcttcagacacttctgaaaaccctttcagaaaatcccagtcgccccatactgatgactaatctcaactaaaacagggcttcagccagtgtgaatgccactaatgccaccaactcacctttgcttttctgtagggtgtgcacctgtatgtacacattcagcttttccgggattaacctctgagttctggtttgtctttcagttgaccatagtcggattaaactacatcaagaagataatgactatatcaacgctagtttgataaaaatggaagaagcccaaaggagttacattcttacccaggtaagcagattgtctgaattttctatttaatgtcaatttaagagtttgagagtgctgttatccacacctcaaataaaatctgccacatcctttagaaggtcaggatttcagcataccaaaaagcagcaaggaagggggaaaaatcatccttcaaaggttcagtttggttataaggaacgctaatcttttctgggaagcataagatgacattgctggaaatgagagcttatagaaaacaacattaaaatgccagagttgcctgtgtggtctgttggcagagacagcagagccatggctggaggagggtctgtacctgtgttgcttccagaagtatttgtcgtagagcacttgtgatggcaaatctaagaacgttagcagtagaccaggaatctctgtccagagccattcagagtagctcagcatggttctcattctttggccagaagaaaggcatcattggatcatgtgaacaagcatgaaaaatgacttaaaatttctgttggcttttggcatctttatggaaacaaaatcctgaaagtggtttaataattgagcctcttgtaaaacactcagtggcatgtgaccaaaagggtatctgggaaagaggataaaaagagtttctttttaattaatcttctcaagtcttaacttgttacctgtaagttggtctaaaaagactgggtttcttattttgtttttcatcataatttttgtttctcattccatgtcagctttcagtcttatatggctttaggccacagggcgattttgaacatttgtaattttgcttaataattaggaaattaaaattctggggaagacagaatgctctatgaagaaaggctgctttgagcaaggagctaggtcagggcgcgttcaactgaggcctttcttcactgcctttttgtcttgtcccagttcctccccatttatgactaaaatcagcccagatgcttctcgtcatctgggatgcagagcatcagcccagctgtgttcagtcctatggggccattgagtaagttcttggtgcatggatacagggcaggcctttaccaggccctgagcccctggtcctcccagcacctctggggtatttaggggaggctgatgggggagggggttgataaggcgggagatgtctggggatgaggttgaggcaaaagtgacttcttgaggactttgctttttggagaagtcaaatttcctacttcttgatttcagcccttcaactctggtatggagtcaggaagccctttaaatacctgttgtcgggtgtatcatgtcaagtgttgcattagcaaatgaccatgtatccttgtgctactgtcctgcctaccccgcatcctagcgcttccttgggacatgagaagctctgtctggtttgtgaggtggcactggggatgttgagaaactgtttacacagtttccctttgccctggggatttactaaaggagtcgaggcagcctgaccccaaagcatcacccctggacactatgaccgaaacatttccccagtgcccaaaccaagaacacccttcccatttttttttcagtggtgttcattatgtaataatacaagtctctcttctcattttttaaaagtcagaagtacagaagagcagagaataatgtccaaggggccctccttcacctcccccgtgcagtgtcagctaagtgtggtgcgtgtccttgcagatcttaggggattgtgatccttcagaccattctaaactggggtggtgctgggagttagggaaggcatgaagggagtagtggagagctgcagtgactggggtcttcatgccagggtggagaatgcaaggcccaggtggccagccatgtgccacgggatttctggctgccaagagctgtttatctgttcactggggagggaagagttaaatgtggtctgcttttctccgagtcccttcagcacagggagtgctgacttgtcttgttcaggtagtaagttcaagatgagctcaggaaagaaagtgagaggacactgagggctagtggttgagccaagtgtgatgggacttaaagggagaagatttaaagaataaggagcttatgggccggggacggtggcttacgcctgtaatcccagcactttgggaggctgaagcaggtggatcacttgggtcaggagttcgaggccagcctggccaacatggtgaaaccccgtctctactaaaaatacagaaattagctgggtgtggtagtgtgcacctgtaatcccagctacttgggaggctgagacaggagaatcgcttgagcccaggaggcagaggttgcagtgagccaggattgcgcccctgtactccagcctgggtgatggagcgagactctgcctcaaaaaaaattaaaaaaaaataaagaggttaggtgaaaatagatgagaatggaaaccatgagaagaagtgatgctggccaaggacatgacaggttctgatgtggaggtgataggcaatgtctcttccagccactgctaataattgagacaaactcaaggcattcataccctgtgtccagtaaacatctgtgcccattgccaggtgagctggattgaaatgggccagctgctcagcagacaccctcatgccccagtgactctgttccccttgggccacctcattgaccatttatgtttctacatctcctaagtttgttgggccaaggatggaggctgtctgccgtcagggtcctcattgctgatggtaggaatagttgctgatgtttcattggatgttgctgtattctagggactgtgctaagtactttatagaaatgaacatacttcattttcacagttttatgaatagggactattattagtcaagtaagcgatggggaaactggggcagggagcgatgaagtgacttgcgcaaggtcacaagatgatgtgattggaaccaagagaagtgttgtggttggccgcgcccccacactgcctctcatctgcaccaaggagttttgtcccatagcccaagggccttggggacgaatctcagtggaggcccttagcgggcctgcctgagccagaaagcagaatcggcatttttctgtccttggttggcccagccctgaactgagatgcggaaatcgcctttcgctgcctggtagaaaatggagctgcagttactgaccaccaggcagagagaggtgggtccctgtcccagcctcagccaccactctgcctaagctgtggggactgagggcgctgtcgttagctgactgcagaaggtgagcacacgctgtagcatgttatgtttcagatgtcacatgttgtgttattgtgtctttgcagggccctttgcctaacacatgcggtcacttttgggagatggtgtgggagcagaaaagcaggggtgtcgtcatgctcaacagagtgatggagaaaggttcggtaagtctcggcttcatttgctgtgtatgtgatcatgcataccactccatatagttaccattttcgtccagatttttaaattatttttcttgcctttgtatttcctttacgtagtatttttatttaaaaaaattaaaacagcagcatataaatgcatgttggttgtcaaccagttaatgaagtgaataaaagggaggaggcggaagaactgcacggacctcttcgcccccgccttctcctgtgtggtgcgtgtggcgctccgcccacctgtgctgcctgtgcggctctcatcacagtgtggagttgtgtgtggagttatggagacctgcttttatcttgaaaagcaagttcttagtgcatcttcatggtgtctgattttttggctggtgagagtgtggctacctctgcggagctgtgggagcggctgactagatgagatttgcctccattcagtacctagactcttgccctgccacacctcttcggagtgagcattgacttcaggatgtgtgtcattctaagttcctgcaacttttcaaacacccctcgggctagcgtgtggctgcacggtgtccatttgtgcaggccaccactcctcttgcatctgggtctagccacctctccttcttgacttaccatagttcattttgtaccatgctttcagaatgagctttctcaaatccaagtctcaccacggttcttcccagctgaaaacccttgtgcggttccctttgcctcacaggataatacatggtgtggcttacggaaccctgcaggtctggccctaggcccctggacacagacctctcaccactcttggaactttagccaggacaaagttttctgtttttagtttcttaccatgttctctgggccgaggagtcccagtgcccacgttcatcccacttgcaggcacccctggacggctgcccccagctccccaactgcctgcattctcccctgccctcctcactctgttggaatagctgagaatagccgatttctgggcagccggcctcctgtgtagactgtcctgtgtagactgtcctgtgtagattgtctgtgtagactgtcctgtgtagattgtctgtgtagactgtcctgtgtagactgtccatgtaaactgtcctgtgtagattgtctgtgtagactgtcctgtgtagactgtcctgtgtagattgtctgtgtagactgtctctgtagaccgtcgtgtatagactgtcctgtgtagactgtctctgtagaccgtcgtgtatagactgtcctgtgtagactgtctctgtagaccgtcctgtgtagattgtctgtgtagaccatcctgtgtagaccatcccatttagaccatctgcctgtgcaggcgcaggccagtgttcagcagggccacaggctcctcggcctccctgccctcgctgctccccaacactgccaaccctgctgcggggtccaggaggagatgggctgaggatcgtggagaccagcaggagcgtgtggcccaggagcagggaactgggtgtccttgggccttgccaggtccaggctcagctaggacacggctctcacagctgtcctggttgcctccggccacagaagaaggtgagggctccagagaggccacctttccaaaaaaagcacagtcatggccctagaatgtaaaaaatccaagtgttaagaaggaacacatcaaaggaaacttcagcagtgaaaacttgaagcattaaccacgaagcctctgcctccaccacacacaaagaaacggctttagttactcgcagaaagtcttcctcttaggacagcgcgtgtttaaaatcataggggtttggtttgttttgttttggggttggggttttttgggggttttttacccttgcctactttttaaaaaatgaaagtgtttatttgcccaacaataacagacagggagcttgcctaagtgttctgttgatgatataatgtatcttgtcttagaaaaaaactttttcagtgaaaggtggtttttaaattttttcttccctccttagtagcttgattagtaaaatgtgaagttacaaatgtgaagcaaacccccacccttcaccactagtcagcaattttgagtaaagaaacaaagcatcaggtgctcacagcacacactgtcttagagggaaggggaagcctggtggcctgtggaagccttcagcatagctccatctgcaggcttctgaccctcagcactactgacacttgggctggatcattgtctgctagggatccgggcagggagtggctgtgctgggcgctgtaggaagtttagcagcatctctggcctctatccaccagatgccagtagcaccccctccccagatgtggcagtcagatgtgtttctgtctagactccagactttgtccaacgtcccctggtaggccaaattgcccccggttgagaaccaccgctctagatggtattgagggttgggaattttaaatcaagacatttattcagaaattaccagatatagtagcatttgcttcttatttatttctttgttgctaagtgtttggcaaaacctctttgctgtgagcacaaggtttgctttagcaattgttgtcacattacagcaaggagtggtgtccagcgctgtagttatgtatttgagcagtgtccagtgctgtagttatgtgttccagcctcaccaggccctgtgcttcattgtctcccactcaagactgaccacaaatggcccacagatccactgtgacaacctttccctttgggttactgtggtggcatcgagaacatggctggttggctttgctgtagtttactgtgataactgtgccagcagtccctgctttcctttgttaagtatcccattccactggaggattacttgggcgtgcagattggcatgaaaagcaatgtatggtttgagattgttaaagtttctttgggatcaacattttcaattctgtatcagcattatccctcccagagggctggctgggagaaatcatgagaagttacagtatcttatttgctcagctaatctaattataaatgatccacacagcttgtggtaaaaccagcttttggggagttttcatttaatgcatacttgtcttctgatttccttccttcaccaaatagtgtaggatgctccctcttatttttggcaaacatgcctgttatcttttgggaccctgggcttcctggaaaccagttatgcagaagatgattgtgtgtgttagactggggtcatccagatggctagagttctcactggttctgtttaaggattgactttagacacctcagtgtaggctgcaccatggcgtaagggttgggattgttgtttagaagggggaagtaagcaaggtgagtttaattggccattgcagaatctcacccgtatctccctcctgaaatcctcactaaagctgccgtttgctttcaggtgctttcatgcacaagacactgcattttgtatcacagggtccatataattcatttttctctcgtacttagttctctgtgttaagaattacttacttagttctctgtgttaataatttttggcgaaaccaaattacccgtcacagggttactgtagatgtctttcataggttttccaaacaccacttgcccacttgtttgggaaggccccaaggactgtttaacatctgccttcatggtggaaacagcaactatgagagatgctagcatgttggcactgccatgttcctctggtaccagcccaagataggactcaatttgaggcctggtgaagtactgtgttctaataaaaatccatctacttttcatggccgtatatatcaatgtaatagggtaactggaaatgtgatcttgtgccttttaaaaattttgtgtgtttaaaacaaaaatttctattggaaatgacagagcatagcttgttgctgtagacacctgagagtccttaaaaataaatattgggttattgacacttagttgcatgacagaattcctcacttgtacagttccaaagtcttagtctttacccagattacagagggttattaagcattaggtttggttttgaaagtgagtgcttgctgtctggaggtgagctttaagactcgtctgccctgcttatgagatgaggaagggtggcctcttcctcctgcatttctgttcttcgcttccttctctgtctgctcactctgtggaatgcccaccccagcacgggtggggtggaacctgtcagatcagtctcttgtttctggggtcttgaggcattataagatctagttgttagaagtgtgggattaattcatcttttcacattcttctaagttcctgcttttagctgccacacccactttggctaagtgggggtcttgccatgtaattagcgcctccatgccaagtggcagaattgcttcaatggtgacagattgtccccattcaagagttcacttttggcaactcatcattgatccaggaaggtgacatggatgaaactggctaagacttcagacaggcttgtgtccagactcttgagaaagctctgttggcttctggtctggcactgtgaagtttgctgtgatgctggcaccacaacctggtgtttcctaatttgtttctcccacattttgctttggttttgtcttttgggcagcttccagctccagtagagcaggaccaataggcatttgtggttctatattcaccctcctcacgtgcttcctggctcctcattgcccccagatgatgccacaggtccctgggcctgctgccagtcgtctgtgatctgggcctctgctggccccttctccagctgctcttttcagcctcttatttgcagtcactgcctaggaaatcctagtcatccttcaaaacctgcctcttgcacagagctttctctgatctctcttttctgtaaccttggctgacctgaaacatttccctcttctgaattcctgctgcatgtccgtagcatttccccctcagccctcccccatagtccaccttgtcactgctgggcacagcagtgtcttctgacagacagctggccctgaagtggttcccttcacccacaccatcctttgccccagaggaggtattgagtgggtcagtgcacgtgaactgccagtgtcatttgccaaagagctgttgacacacgctgacatttcttttgctgaaaatcataagggctttgagcttccctctgtccaggcacatggtcaggctgacccggtagctctgcccctgctgacctgccatttttgtccacaacagttatccatgagcagaaacatttgtgtaactgaggcagaaacttagttcaagtaaaatgtcactaaattcgagtcagtttttgtcttagaccctaaatgaaaccaaattttcataaattttcttgttttaaagaaaaatttaatgagctacatttaaactgagaacatcagatagtgtctgagattatcaaaatagaacatcaaaagtatttttctgaatgaactgaaccaaaccagaatgaaagggcaagccctggggagcccgtctccaagccttctctgaaagggagtctgtatttggtgataactgctcagcctctccaaagggcctcacctgctgtctctcccagttttatttttaattgcctgtgagttttctgtgcagggtaaggcacctacattctatgccagcagcctgatcaggtcctgggtaatgtttgaaatggctacacagaggagtttcaaagccttttgttcaatctggcttcacctcgtagacggtgagaaagcgtcagagccctgcaggatcccgttgccacgtttgaccggggagccgatgggtttggaagtctgagccctgtctgcacaacctgccccggtcagcagcttcgtgcccccacccccatctccccatgaggcaggcatctgtgctgaccatggcttccatgttcagaaacccccaggcctttgagttatcatgaagcttgtgggatgtgctccaagcctcctgccatagaaaaactgccatattgctcacaataattcactattatttgtttccccagttaaaatgcgcacaatactggccacaaaaagaagaaaaagagatgatctttgaagacacaaatttgaaattaacattgatctctgaagatatcaagtcatattatacagtgcgacagctagaattggaaaaccttacagtgagtatagcacacacttcagcacttcaggcggctactggttcacatgcctcttcctttatcccttgggtgatattacctaatgtcagtgttcctggcttttgtataccccgagcaagatgtggtttgggcactgtggtgagcggagcttacttgtgtacctaccaagtgcccagggagggtggaggccacagtgctctctctgacctttaacaacagttaacaccagttcttagggaaaggagagtttcttacccaaaagactggttcctgcttgtgcagctgcagagggactggagcggcagcctgcaagtcccagtgaagcatgctgccttctttgtggtcctcagtcttcgagtctgaagagagggaagaaggggtataggggctcactccagtttcatagctagtgaaagttttctgggccaggtcttgggtttttttgttgtgggaagagtttataacaccagctacttgcttggtaaaagttggtcttggaacatggcaaggcattgtggcaagcagcactgccgctgaacgcgctgctcctggggctttggaataattcccctggatccgtaacttgggggtgttcatgtcattctggggaacagtggagggagtgcgcggcagcacctgggggcaccagtgaagagtggccagccaccaacctctagaacctaactggggtcgaatcctggccccaccttactagctcatcacagtgtctccgtttcctcttctgtcaaactcaggttttgcgagggttctgggaggtcctatacgggaagggttagcagttaccatgggtgtgtagcacgggctttatctgaagggaaggtggagccgtagggagaccatgtggagtggggctccagggctgtgtgggtggggagggatctgcttctgggttaccccatgcctccccttctcaagtactactttttaatcatcatggctcctgccattcatttcatagttgatgtaagccaggtgcggtggctcacgtctttaatcccagcacttggggaggctgaggccaggaggatcactcgaggccaggagttcaagaccagcttgggcaacatagtgagacccccgtctctacaaaaaaacaaaaacagttagtcagacatcgtggtgctcccctatagtccagctactcaggaggctgaggcaggaggattgcttgtgcccgggagttcaaggctgcagtgagctatgcttgcaccactgcactctagcctgggtgacagagcaagaccctgtctcaaaaataaataaataaaaaaaatagtagaagtaagatctagaatgtagcacaggttaccaggacgtaggcaaggggttcgggctgcctggctcttgaggatggtagcagtgcagctgatgtgagtgctttctgccctctggtggtgaccgcgccggagtcaccagccctgccatagccctgatggggcagagggttctgagtacggtggatggaggtgctttctggaagattctcaggagtaacatgggcagtgtgttggaatgtgctagaggatttatgcagtagccttttaaaagaatgctttttagcatttgcaagcctgacattaagagtgacttctgggaaactatttgcttgttgagggaaactgaatttcaacagagcagaagagctgtgcgctttttgcttggcagagtgaatacagccagctcagaggttttgatgttaggatctgtttgctccaacagactttgtttttaaaaggcttttctcagccatagctgtctgttctagcacaaggctggaatgagttccttgtgaaagaggtgagcaggtgtgagggagggtgtcagtgggcggtaacccacaccttcaaggattaaaggaaaacttgcatttggcatgcttgcttcttattcaattttaaaatacattttaacggccgggcacggtggctaacacctgtaatcccagcactttgaggggctgaggtgggtggttcacgaggccaggggttcaagaccagcctggccaagatggtgaaaccccatctctactaaaaatacaaaaaaaaaaaaaattagccgggcgtggtggcgggcacctgtaatcccagctactcgggaggctgaggcagagaattgcttgaacccaggaggcggaggttgcattgagccgagatcatgccactgcattccagcctgggcggcagagcaagactctgtctcaaaataataataataattttttaaaaatacattttaagtccttttcttccccacctgcctccacccaccaaatagaagaggtatttcttcttctttaatgtcattaaggttatatggataccattttctagagaggaaagaatgatggaattgcctagtgtgagtctagcaattatcctaacatacacaaatttctccttgttctgtgccaagatactgtatttaatatttaatgaacattaaatattatttactagtgtatttaatggctgaggcagggttaaatatgtattattttcatcccagcagagttgggggaggtcctagtaactatgccatgagctctgtgagggtgaggtggtgtctttgcccccgcctccctggcacagtgactggcacatgattggcatagtgtggacattcgtcaagtgaaggaaggcatcatgagcagatctctggcctgaatccttctgccatcagctgctcgccaggtggccctggcactgggccacagggaaactctccaggctggtatggttcctgtctgtggctgtcttcccgggcccatgttaggagactttcacttccagagccctttccctctcagggccttgcttaccaagtgactggttcccatttactaggagctcttaggtcattgaagatgttgcgtactccccccagtgagggctgccttttgatcacagccgccagaagcctcaaggaaggagcagagctggaaacagacgccaggccattgcttctgttcctctggggcagacccagccacggaagagacattctgggacaagggctggggtccacctttcaaacgtgtctgcagcaggctctcagcatggactctctgcctccaaacatccacctcctcatcggaaaatggatgggagtgcctgcctggagcagctggtgggagagcgcagcgccagcacgtaggacacactcggttcatgggctgatgccgttcgcattgactgcctcttcagctgggtgttgagccacaccttggagtcaccagtctttggagaccaagtctgctacttttttctctaaagtgacaatcctctgaaacctccagatcatcttgaagcccccgtctgaaagttgcccagagccagtgcctcacctgctgttccttgttcactttttcacgggaggccttgcagggctttatgacaagattttatgggtggctgcccagcatcattgtgactcgtgagacagagagaaaccagttgtaaccatgtagacagtggaagtgatagggagaaaagaggtgaggggactcttcaatccgaagggaaatgaagtctaagcaggcgcaccctgcaggttcagtgtcaagcccagggcctggccccagggtgtggtatttgttgactgggtgtgtggaccctgggagaaagtctgagaatgaatgttcctcttagaggtagagagtggaaggtgactctgtgtgtacttggaattagtgatttctgtacagatgattcttttagaatcatcatgagtatttttctctttcagacccaagaaactcgagagatcttacatttccactataccacatggcctgactttggagtccctgaatcaccagcctcattcttgaactttcttttcaaagtccgagagtcagggtcactcagcccggagcacgggcccgttgtggtgcactgcagtgcaggcatcggcaggtctggaaccttctgtctggctgatacctgcctcttgctggtaaggaggccctcgcgggtgccctggggagctcctctacctgctctgctgtgatgttttttcctaagtagaaactgaagcgctcctcttccaaaatacagagactcactgtgttagtctgtttttgcgttactaataaaggcgtacctgagactcggtaatttgtaaagaaaagaggtttaactggctcccggttctgcaggctgtacaagcatggcaccagcatctgctcggctcctggggaggcctcagggagcttccagtcatggtggaaggtgaaggggagcaggagcaagagatgggggaggtcccagactcttaaccagctctcttgtgaatgcattgcctcagggagggcaccaagcctttcatgagggacctgtccccctgacccagacacctcccacccagccccacctccaacactagggatcacatttcagcatgagattgggaggggacagacatctaacggtgttattaacgttgcccttgagaattggacctggctgacttatatctcctctctggctttcagatggacaagaggaaagacccttcttccgttgatatcaagaaagtgctgttagaaatgaggaagtttcggatggggctgatccagacagccgaccagctgcgcttctcctacctggctgtgatcgaaggtgccaaattcatcatgggggactcttccgtgcaggtcagcattgcctttgtttgaatccaggtgtgaccattttaacttttttgtctttgaaggaggctgtcagttgtaaaagttcaaacaccgtctggtgtcaggggaaatagctacccttcatgtttaaaatagctagaaagttgtcaaaatgttcaccatgttgcactttgtgcctttgaagtgctcacatagagagcattgataggaagacgagactttattttcaaaagatttcatcttccaagtacatggctgcagccctgagaggccgagagcccctcgccaagccgtcacctctgctcatgcaaagggatttcctgacaaaccagccgaagtgaacactaataggacttcctcttgctgctctttcaaggatcagtggaaggagctttcccacgaggacctggagcccccacctgagcatatccccccacctccccggccacccaaacgaatcctggagccacacaatgggaaatgcagggagttcttcccaaatcaccagtgggtgaaggaagagacccaggaggataaagactgccccatcaaggaagaaaaaggaagccccttaaatgccgcaccctacggcatcgaaaggtaatatgattgggtcccagcttgttggggtgaggggaaatgactttctgttctagaaacacacgctggtactgaaaccctgtggatgcagcctcctgttggcaagcagcgcttccgcatccttggggaacagggcgcgtggaccacagccactccactcctggctgctggaggtccggtattgggcacagggtggccgcaggacatgagccacttctgtgggcttctagtgccaccttgtggtgcttgttggaatgaggggctcggagccaccgagtagggtttttctgccccccctgacgacagcgccctcccccaggtttccggacagtcctgaaatgtgatgtccaggcttgagtgccctcagtccccacagtggtcctttggggaatgtaaccttttttatgtggtcttgattaaatcccattttacttccttgcaggttaacaaccattattgagtacctattgatatgtgtggtgtactgagttaactagaacatgtcccctggtctgtgttctagaccatcttgctgggaaaaaggcagacccaaagcatattttggtgggggcccatggacagtgatgtgatagaggtgtccgctgaggtggtcagggaaggctgcttgcagtaggtggccgtgcacggaaagtttgcagaatgagcaggtgttagttccagctggagatgactgccggctgtgcccttggtacctgctttctggagggaagttttaagacgtgtgcatacttgacccagcagttgtatacatggagaaatttactttgcagcaactctcaaaacaagcgtgtaaagatgtgtataggtagttgtgtttgttgtggcattgtttgtagtagtgaaaaattagagacaggccaatgatataaccagggacctgatcaattatgttctctcccggtgttgggatattctgtagctcttaaagaatgagatctgggtgtactgatgtggccagacattgcaattgcagtacatgagaaggcaaatcatacagtagtgtgtacaccagtgagtcctccagccagataaatcctcacagtgaccagtcgcccaggcaccttgtgaaccctaccctgggtgtgggtgctatctgaagtacctgggggagggggtgacaagtggacttcaggctgatgtgggccctggcctggccctccctccaagcagagggggctggctcgctggaaggttaacatcatccaactctgtctacacgtggcttgttttttcctagaattcctgccacaatagcagcatccttgccattcattttctccaaagtgagtaacccatctctgccctctgattcctcagcatgagtcaagacactgaagttagaagtcgggtcgtggggggaagtcttcgaggtgcccaggctgcctccccagccaaaggggagccgtcactgcccgagaaggacgaggaccatgcactgagttactggaagcccttcctggtcaacatgtgcgtggctacggtcctcacggccggcgcttacctctgctacagggtatgtttccactgacagacgcgctggcgagatgctcgtgtgcagagagcactggccgctagcccgatggtaggattcagttctgtggtgcatctgagccagtctcagaagaaacagatcaaaggtttttaaagtctggaactgtggaagggctaacaagagaattaaggatcgatgcactggggttttaaggagccctctggtcccaagaatataagagtctaatctcagggccttaacctattcaggagtaagtagagaaaatgccaaatacgtctgtttctctctctctttttttttttattcctttgtttttggaaaaaaatagagttacaacacattgttgtttttaacctttataaaaagcagctttttgttatttctggaacaaaaaaaaacaaagtaggcacttatgaaactttctcatacccttaggtgatgtaatcagccatataatttatatttgatttcccagggaaggaatcccaaacttttacgaatgtaaactcccttggagaagagggttaggacgctgttgcgctcaagcccccctcagctgtgtgcacactgagccaggacagggtctttgagctttcccactataagaagaacagcaacaaaaggccgtctagaaaaacagaacctgcctctgcttctgctcagggtgtccccgctgggtttccattgtcctttctccattgctccctcctgtgacagccatcttgctcatgtaccagccctcatcaccccatccccataaatgggtgtcctcgaggcctctgcctgggggtcagaggtcaccacagggtggccattggcatgtcaacccgctgttaattcagagaagtgggctccacctcattgggagaagtgccatttcagcagaaattcacacgttagacgtgtgttgctgttaagtaaggggaagagagaggactagcctcagagctctggccatggaaatgacctcctaagactttttcgtggttttaaatattttacctctttccaggtggcatctgagtacatcagatggttttgcaaaatgcaaacaattttttccttggggatgatttttggggagagggggctactgtaaaaaataaaaccaaaaccccctttgctccctcggaggttgaagttgccggggggtgtggccggggtcatgcatgaggcgacagctctgcaggtgcgggtctgggctcatctgaactgtttggtttcattccagttcctgttcaacagcaacacatagcctgaccctcctccactccacctccacccactgtccgcctctgcccgcagagcccacgcccgactagcaggcatgccgcggtaggtaagggccgccggaccgcgtagagagccgggccccggacggacgttggttctgcactaaaacccatcttccccggatgtgtgtctcacccctcatccttttactttttgccccttccactttgagtaccaaatccacaagccattttttgaggagagtgaaagagagtaccatgctggcggcgcagagggaaggggcctacacccgtcttggggctcgccccacccagggctccctcctggagcatcccaggcgggcggcacgccaacagccccccccttgaatctgcagggagcaactctccactccatatttatttaaacaattttttccccaaaggcatccatagtgcactagcattttcttgaaccaataatgtattaaaattttttgatgtcagccttgcatcaagggctttatcaaaaagtacaataataaatcctcaggtagtactgggaatggaaggctttgccatgggcctgctgcgtcagaccagtactgggaaggaggacggttgtaagcagttgttatttagtgatattgtgggtaacgtgagaagatagaacaatgctataatatataatgaacacgtgggtatttaataagaaacatgatgtgagattactttgtcccgcttattctcctccctgttatctgctagatctagttctcaatcactgctcccccgtgtgtattagaatgcatgtaaggtcttcttgtgtcctgatgaaaaatatgtgcttgaaatgagaaactttgatctctgcttactaatgtgccccatgtccaagtccaacctgcctgtgcatgacctgatcattacatggctgtggttcctaagcctgttgctgaagtcattgtcgctcagcaatagggtgcagttttccaggaataggcatttgcctaattcctggcatgacactctagtgacttcctggtgaggcccagcctgtcctggtacagcagggtcttgctgtaactcagacattccaagggtatgggaagccatattcacacctcacgctctggacatgatttagggaagcagggacaccccccgccccccacctttgggatcagcctccgccattccaagtcaacactcttcttgagcagaccgtgatttggaagagaggcacctgctggaaaccacacttcttgaaacagcctgggtgacggtcctttaggcagcctgccgccgtctctgtcccggttcaccttgccgagagaggcgcgtctgccccaccctcaaaccctgtggggcctgatggtgctcacgactcttcctgcaaagggaactgaagacctccacattaagtggctttttaacatgaaaaacacggcagctgtagctcccgagctactctcttgccagcattttcacattttgcctttctcgtggtagaagccagtacagagaaattctgtggtgggaacattcgaggtgtcaccctgcagagctatggtgaggtgtggataaggcttaggtgccaggctgtaagcattctgagctgggcttgttgtttttaagtcctgtatatgtatgtagtagtttgggtgtgtatatatagtagcatttcaaaatggacgtactggtttaacctcctatccttggagagcagctggctctccaccttgttacacattatgttagagaggtagcgagctgctctgctatatgccttaagccaatatttactcatcaggtcattattttttacaatggccatggaataaaccatttttacaaaaataaaaacaaaaaaagcaaggtgttttggtataataccttttcaggtgtgtgtggatacgtggctgcatgaccgggtgggtgggggggagtgtctcagggtcttctgtgacctcacagaactgtcagactgtacagttttccaacttgccatattcatgatgggtttgcattttagctgcaacaataaaatttttttctaaagaacatgaatttggggtgcttcccatttttttctttgcttaatagagctaaaccaggatgagtaactcctgtttctttctatccctgctgatgtgaaacagatgttgtcaatcagctggggttagagttttccacttctaagaattaacctcagcatccctgcattgccagcaccctcaggctggagcgctttccttgactgtgagcttgttgaacaccttaggcctcagcccatttccttcccaaattgacgctttgcctgtgtagggccctcagataacttaacaaacttaccagtgttgtttgaagaacagtgttttgagttgtaatctcaaaaccatatcccttacccaattacctgtaagacacaatggttaccacatctcagtacgtaaagtccacttgatatagaattgacttagaaataagacagattagtatagtttttcatttgtgtacaaaattaaacaatgtaaattccccccaaagtgatttttttgactttttgaagtaattttggacttgcaaaatgttgccaaaatagtacgaagagttccccagtaccctcgaagtttcctcgactgtttcaaagctggctgcaggcccaggctcatgagactgggaagaggacaggctgtggtcatgtggacccacaggggcctggggctgcagaagtcagtgtggcttccaccatttcaggtataaaaaagggcatctaagctttcaagaagagggaggatgctctagggcagcggtccccaaccttttctggcaccaggaaccggttccatggaagacaattttttcacaggcctgggggtggtgagggatggttttgggatagaaacttccacctcagatcatcaggcatcagattctcataaggagcttgcaacctgatctcttgcacacattcagttcacaatagggttcacgctcctaagagaacctgatgctgcagctgatctaacaggagatggagctcaggtggtcatgctcagtcgctcgccactcacctcctgccatgcagtccagttcctaacaggcctcagaccagtaccggtctgtggcctgggggttgaggacccctgctctaggctggtactgctgatgcttaaaaagagagggtttgccagaaatcagatgggacaaaagggcaaaggccgtgccacagagtgcccatataggggagagcacgcctggagccttcgagagcatgcagagaagcctggagactgcatttaccggagctgctgcctgaggccaccctccaagtgtccccacagcgcaccacaagaccacaggagtgacctcctcactggcaggtatttggggaaacaactgctgtctactcttttgggtaaaaagtgaaacaccaatagtttaattgaaatttcagaaaattgaacatatgaacaaggcaaataaatactaagtaagttaaaaacacaaaatatgtccaggaagtatcgatgagaatgttcaagttaaagttctccaatgccattgctacagcaacctcaaaccctaggttctctctgcactattaacacagacatctcaggacatggtttgcttttttttaagacttaaataggaaactaatttttctttctttaaagcaattgcgttcttcagtgaactctttctttaggccagttgatggcttcttagcagtttattgacgagatcctagggtagcttccgaagctgggttgattgattgcatttgggtgcggatggccaaagtgagtggccctactgcctgtgctgctcagggctcctgggctgatgtggtggcttcttccctttgtgctgctgaacatagggaaagtgaggttcacagtccaccatccaccagccgccgtctgtgagctccaccagcactcgcagcaagtcagtcgggctgagagtgtggttgtagaaaccctggctttgtgccttcccaccttccccagctcaccaaggtgacacctggctgctgctgaaatggcctgagcagtcttgcattagcagggccagccacctgccagcctgctgcatccccagtgcctcttgacgcagaagtgccgagcagctgaccggcagcgaggcctggagttctacacacttgccttggagccttttatttagggcctcaacttgcctggccttggcccttttgtaggtggccacctagtttggctcagctctgcatctcggggaaggtcacacagaccctcagccagaagttgagcgctctgttgaggccgtgcagcccctggaatgctgtacctttgccttgcttttttctgcctctgtacaaaagaccagcccatgccctggggctgggtcaatggccggagtctcaggtagagctctgggcagctcacactcctggaggagtgcacagcaccattacccagagtgcaggctatgtccaggctgggcagcagcaaaaaaaacgatgtgagatttgtgctcatcagccaggattttttaaaatattgtgatttcaacatctgcctcctggcaaaagacttctctttgttctgagcagagcttgtccatcttctcaaaagctaaccgtcctttttcacctgaaatagcaaagggacctgtcagcgggttggatcctgccttggcacttccaactctcctgggccagggtggccctagtgcttagtgactgtgggtctcagtggtctctgcaaagcggcaggggagggagtatgtgcgggagcccccacctggtgactcacatggcctgggggccttgtctttacctctaggatgttccgctgaatgggaaccctgccttgcctctggcttctatcccaaaggtctaagaagacagcgaacactccctgccaccccagccatggaggaggcctgccttggcaggatgctacaaagggtggaggtcggctctgtgccagggctgctaacggtgcccatcccaggtgccccagagttgttctgcctgctgggagagctgggtgtggcctctcgcagattctaagggccccaggcaccccgctgcgctgcacagtttgtgccactttttaccgaacgacagtgtggtttcccgggctgccgcccgcacggcctccaggtcagactggcacaggctggcagtctggtcgatgctttcaatgccctgttcgagattaggagaaaaagaaccctttagggggccttctcaacagcaggtagagtccacttagtggccctgcagggccagtcctagcatggtctctggggcctcagccccttccttttctccaggcttccaggttttttaggtggcctcaggttcatgagaggcacctctggactctggaagcgtctcgcctcttcagcccttacacccgctagggagccaggctgttagcagaactcgtcatcctggatgcctgctgaaaggctagaattgaaaaggagacctgctgctttctggaccttcctgcctccctcacgctctccttgccctactctccaggacagcctgtgccagtacttcgcccaactcaggcacatgccccctggctgctcctgcaggccaaggaccggcatgcgctgcagcgccctctactgggcacctggccctcgctggttttctgatcctaaccagcttctcctcttagaatttcctgctgatccatcccagaatgaatgggagttcaatctgtactgaattatctttcatctagcaattgtgcaattccaaatgcaggtgaggttgagggaaagcgggcatcccctcacatccatgggatctatgtgtgggttgtatcaagagtctcaaaaatgctcatattctccggtcctagaattgggtctagcctaaggaaataattcagaactccatgtttttttaaagctttatgcacaaacatgatcataagacatgatttatgataaaaattggatgaagtaaactttcctatgaaagcagctgagtaggttaaattaaggtatacacttgatagccccttcataaagaattctcaagtgaaaaaaaaaaaaaaaaaaagaaaaaaaacaccacaaataaagaattctaggccgggcgcggtggctcatgcctgtaatcccagcactttgggaggccgaggcgggcagatcacgaggtcaggagatcgagaccatcctggctaacacaggtaaaaccccatctctactaaaaatacaaaaaaattagccgggcgtggtggtgggcgcctgtagtcccagttgctggggaggctgaggcaggagaatggtgtgaacccagaaggcagagcttgcagtgagccgagatcgcgccactgcactccagcctgggtgacagaacaagactccatctcaagaaaaaaaaaaaaaaaaaaaaaaaaaaaagctaaagtgctgccagtctaacacaaaatgttcttattttgttgactgtttttaaactatgtttggatcaacaattttaaatgctcacacacacccacaaacttttaaaagaagcataccagaatgtcaaccattgtttctgctacattctaggatgatggataactttcttttctatctctgtattttgtaacttttttttttttttttttaagatggagtcttgctctgtcacccaggctgcagtgcagtggcacgatctcggctcactgcaacctccacctcccgggttcaagtcccgagtagctgggactacaggcatgtgccaccacgcctagctaattttgtgtgtgtgtattattagtagagatggagtttcgccatgttggccaggctggtttcaaactcctgacctcaggtgatctgcctgccttggcctcccaaagtgctgagattacaggcgtgagccatcacgcccagccccagtggaatcattttgaagttaactaaccttaaccctaaccacaagcaggcttttctatcagccactaatggggaaacgtcaggctcaccttgaggtgtttgagcgctaggcatgcggcctgctggagccttgcgtcgttctctgccagggcgttggtgtagaacagcaaagcctggggagagtaaggaggctgtgaatggaggggtaagcagaagtggagtccatggttccgggtccatcagccaccaggtgccgacagtaaggcacgctgtgcccatctttctctaaacaacgttcaggacacgatcggtccatctttgggccctgtgtacacagtcacaagatctatactgtggtgtttaatttatccctaaaaacagatgccagggctaatacaatgaagaaagctatttttgtctaataatattccggaagtgcattctgaaactgctgtctataaaatgctgaatcagagaaatcagatgcccagctcagaacaacagaagaactgatcatcccatgtgcgttgccctcttcagctgaaaacgggcaaggctgctgccttgggccagagggaaacctgcctattcccctcagccctcctgtccaatcccagcggtgaccctgccctcttcggtctcacgaccatggccacatcagttcatgtctttgggcctaacttgactcagctgaaaacaaagctggcacttgcttcatgtgttattgtagggtttgtcagaaagcacacagggttatgcccggcccgcagtggagtccagcgtctgcggctgcaaagggaaacccaggagtgggtttgccctcactcagtcgagtggctgcaccttcaactgcacgggtggggcgatggaggggcccaggtgtagagttggctccagggacctgggcccagagccaaaagagaatggccgcctttccatctgcaggtggctctccaaagtgtctgctgctttgggaagacagactgggagtaggatcgggtcctcccgctcctcctacacagggctctggtgaaggctgtgaggccacatcggtgtggaaatgtcacactgcccactgcctctaaccccagggtcccaggtcatggcagcctactccttcctcagcaccctcatctgaggccaagcaatctgtcactgggttggcccccacctcagtgtttcctactctctaaagtctgtcacatgaagatgaaggcccttttttttttttttttttgagacagagtctcacttcgttgcccagcctggggtgcagtagcacaatctcggctccctgcagcctctgcttcccatggaggccttgtttatatacccccatacccaaaaaacaaaatacacctgacttcagtggatccttgaagccaactactagttttcaggaactacagaagacagagaaatacattaaactaccgttaaacttcctgcaagcagcaaagtctagatagtctaggtcaacctgggatcgatcaaattaattgcaagcagagaaagaaacggggaaaaaaacctttagattgattggaagccatcagccaatcacaatgtgtgtccttatgtagatactattttaacaaaaaataaaacaggatgcttgaggcttggaaatttgaacataagatatatgatataaaggaattgatagttaattttttagataagataatggtgttagagttgtgatttttgaaagaattcttaaccttttgacacatatagttaactatttaaggtcaaataggatgcctcaggttgcttcaaagtgatacaggggagtggaggggaaaggggcaggattggccatgggttgatggtggttgggcttgggttatgggtgcaggtggattcattatattgctctgtctacttttgcaagttcaaaagtctccaaataaagagttaaaaacaaccacaaagtaggcggatgggctccaagaagggctattggcaatggaactggagatttcctctctagtctggagctgagaccatcagtgtagactatgcccttgatgtcacccttcctgaacccctcagggtgtggcgccttaaacgtacagtagttacaggcaaagagtgaaaaagcagagaggtccactctcttggttttcaaatggactgaacacagtgacccattaccaggtagccatgaatattaattgaaagtaaataaggatgactatcaaaacactaagaaaggctgggcgcagtggctcacgcctgtaatcccagcactttgggaagccaaggcaggcggatcgcagggtcaggagtttgagaccagcctggccaacatggtgaaaccctgtatctactaaaattacaaaaattagctgggtatggtggtgggcgcctgtaatcccagctactcaggaggctgaggcaggagaattgcttgaacccaggaggtggaggttgcaagatcgtggcactggactccagcctgggcaacagagcagaactctgtctaaacagacagacaaaaaacgcactaagaaaaacattcagcgtgcaagtgacatctcagaggcctaacagatgtgttgctttggaagcagcaaggtgcattcatgtgtgttagatcgtagcccaggtccctccatcaaaatagctcacagctactgcagcccctggcactcacttctttgtacttttccatgagaacaccagcttacctatgcccacacatctgtggccagggtctgccacctgccctggacaacgtaccttttcccggaagcttctgttcctgactgcaccagccaggcgagcgctggccgccctgcacaccctcggagtgccgtccagctggagcagcgcccaggctcttaaggtctggggcagaggctggagctggcccagccgcttcccctgcagcttccggaccaccttggcctgtcccgcacagtgaagctcctcgatgagtgtcactagaagacaggaaagaggtgggcccaggtcccctgaatgggagtttggcaggacagctgcaagtttgcttggctgctgccagtagccacagaggaacaaatcccagacccaccgggatgatcaccaaggcccagcctggactaatttcacagggagctcctggaatctccaggaaggccttttaacaaggggtcaaatatgctccataaattaataaaaccacagcccacacttccagggactctggccagccaagatcaccctcctacccagctctgacctctgttccgtgctttttaaagctgacttcccttggagctaatatcagcccccatcggctgaacgcagaatctcattaaatcggggttcccaaaagaacagttggcggggatggatgtagtggttctgaattataacctgagaaactgcatgtgacagggctccgtggatattcctctgctatgacagccacccaccccagtcttaccttccttggtgagctgggtgaagtgcttctccaggtcagagacgctctgcctctgcaggtagctgtgaaactggaaccaggtaatgatctgttcttctgggagcccagctccggggagcagcccaccacagctgaccacctgctccaggagcctgcggcacgctggccaaaggggagagtacatcaggagaaactgagacctcgaccctccacgcttctcagctgggagtagcctggtcagctaaaaggctttctgggccgggcgcagtggctcgcacctgtaaccccagcactttgggaggccaaggtgggcagatcacctgaggtcaggagttcgagaccagcctgaccaacatggtgaaaccccatctctactaaaaatacaaaattagctgggtgtggtggtgcctgcctgtttcccagcaactctggaggctgaggcaggagaatcgcttgaacccgggaggtggaggttgtagtgagccaagattgcgccactgcattccagtctgggcaaccatgagtgaaaccccatctcaaaaaaaaaaagggtttctgatggcacgagggcaggtgtccctcactgcattccctgtgctgtaggggaggagtgtgcccagctagagtcaggactgtgactccaactcaccctgagtcagaccgtgttgggttcatccccatgccctgggccccacaccacacctggatcaaaatcccggaggcagggcctgggaatatgcatgtcaacaagcagtccaggtggtgcttggaacatgactgtcacctttcacttgctccacagagaaaggcaaattctggggaagaacgcagtccagccagcatttctagataccctcgtgggcccctgcctgcctcccttcccataaggttcattctttacccgtcaggctctggtgggaggcatggaatctgtccccagaaaaatgctctggcggccgggcgcagtggctcatgcctgtaatcccagcactttgggaggccgaggcgggcgaatcacaaggtcaggagttcgagaccagcctggccaatatggcgaaaccccgtctctactaaaaatacaaaaaaagaaaattagccaagcgtggtggtgcacacctgtaatcccagctactcgggaggctgaggcagaagaatcgcttgaacccgggaggtagaggttgcagtgagccatgattgtgccacagcactatagcctgggcgacagagtgagactccatctcaaaaaaaaaaaaaaaaaaaaatgcaccggcccaccaagtttgcacgcagcttcagggctccacagactgctcagaaggccccacgtggaggccccttctcgcccggtgaaagggcggtgactcgcactgaagctgagaaagctcctccgtccgatggcatgaagacacagaggtgaagacagggctgaaatgaggccagctgtggccaccctgaaggccctggagactcaatacagcctttctgtgggaggggacgacaggacagaagggaacccacctatttccagctgtcctgggtacttccctctgactctgtgctggaaggttttcttgagctggttcagcagcgtcgtggcagggcaggacaggaccctgccaggccctgtgcaccctctccacagcttcaggcaccccttcgtccgcgaggcctgtgggatgactgaaagccccagttcagaaacctgaatggtgactcggggaga

SEQ ID NO: 1516 - DNA, 3524 bp, Homo sapiens
gtgatgcgtagttccggctgccggttgacatgaagaagcagcagcggctagggcggcggtagctgcaggggtcggggattgcagcgggcctcggggctaagagcgcgacgcggcctagagcggcagacggcgcagtgggccgagaaggaggcgcagcagccgccctggcccgtcatggagatggaaaaggagttcgagcagatcgacaagtccgggagctgggcggccatttaccaggatatccgacatgaagccagtgacttcccatgtagagtggccaagcttcctaagaacaaaaaccgaaataggtacagagacgtcagtccctttgaccatagtcggattaaactacatcaagaagataatgactatatcaacgctagtttgataaaaatggaagaagcccaaaggagttacattcttacccagggccctttgcctaacacatgcggtcacttttgggagatggtgtgggagcagaaaagcaggggtgtcgtcatgctcaacagagtgatggagaaaggttcgttaaaatgcgcacaatactggccacaaaaagaagaaaaagagatgatctttgaagacacaaatttgaaattaacattgatctctgaagatatcaagtcatattatacagtgcgacagctagaattggaaaaccttacaacccaagaaactcgagagatcttacatttccactataccacatggcctgactttggagtccctgaatcaccagcctcattcttgaactttcttttcaaagtccgagagtcagggtcactcagcccggagcacgggcccgttgtggtgcactgcagtgcaggcatcggcaggtctggaaccttctgtctggctgatacctgcctcttgctgatggacaagaggaaagacccttcttccgttgatatcaagaaagtgctgttagaaatgaggaagtttcggatggggctgatccagacagccgaccagctgcgcttctcctacctggctgtgatcgaaggtgccaaattcatcatgggggactcttccgtgcaggatcagtggaaggagctttcccacgaggacctggagcccccacctgagcatatccccccacctccccggccacccaaacgaatcctggagccacacaatgggaaatgcagggagttcttcccaaatcaccagtgggtgaaggaagagacccaggaggataaagactgccccatcaaggaagaaaaaggaagccccttaaatgccgcaccctacggcatcgaaagcatgagtcaagacactgaagttagaagtcgggtcgtggggggaagtcttcgaggtgcccaggctgcctccccagccaaaggggagccgtcactgcccgagaaggacgaggaccatgcactgagttactggaagcccttcctggtcaacatgtgcgtggctacggtcctcacggccggcgcttacctctgctacaggttcctgttcaacagcaacacatagcctgaccctcctccactccacctccacccactgtccgcctctgcccgcagagcccacgcccgactagcaggcatgccgcggtaggtaagggccgccggaccgcgtagagagccgggccccggacggacgttggttctgcactaaaacccatcttccccggatgtgtgtctcacccctcatccttttactttttgccccttccactttgagtaccaaatccacaagccattttttgaggagagtgaaagagagtaccatgctggcggcgcagagggaaggggcctacacccgtcttggggctcgccccacccagggctccctcctggagcatcccaggcgggcggcacgccaacagccccccccttgaatctgcagggagcaactctccactccatatttatttaaacaattttttccccaaaggcatccatagtgcactagcattttcttgaaccaataatgtattaaaattttttgatgtcagccttgcatcaagggctttatcaaaaagtacaataataaatcctcaggtagtactgggaatggaaggctttgccatgggcctgctgcgtcagaccagtactgggaaggaggacggttgtaagcagttgttatttagtgatattgtgggtaacgtgagaagatagaacaatgctataatatataatgaacacgtgggtatttaataagaaacatgatgtgagattactttgtcccgcttattctcctccctgttatctgctagatctagttctcaatcactgctcccccgtgtgtattagaatgcatgtaaggtcttcttgtgtcctgatgaaaaatatgtgcttgaaatgagaaactttgatctctgcttactaatgtgccccatgtccaagtccaacctgcctgtgcatgacctgatcattacatggctgtggttcctaagcctgttgctgaagtcattgtcgctcagcaatagggtgcagttttccaggaataggcatttgcctaattcctggcatgacactctagtgacttcctggtgaggcccagcctgtcctggtacagcagggtcttgctgtaactcagacattccaagggtatgggaagccatattcacacctcacgctctggacatgatttagggaagcagggacaccccccgccccccacctttgggatcagcctccgccattccaagtcaacactcttcttgagcagaccgtgatttggaagagaggcacctgctggaaaccacacttcttgaaacagcctgggtgacggtcctttaggcagcctgccgccgtctctgtcccggttcaccttgccgagagaggcgcgtctgccccaccctcaaaccctgtggggcctgatggtgctcacgactcttcctgcaaagggaactgaagacctccacattaagtggctttttaacatgaaaaacacggcagctgtagctcccgagctactctcttgccagcattttcacattttgcctttctcgtggtagaagccagtacagagaaattctgtggtgggaacattcgaggtgtcaccctgcagagctatggtgaggtgtggataaggcttaggtgccaggctgtaagcattctgagctgggcttgttgtttttaagtcctgtatatgtatgtagtagtttgggtgtgtatatatagtagcatttcaaaatggacgtactggtttaacctcctatccttggagagcagctggctctccaccttgttacacattatgttagagaggtagcgagctgctctgctatatgccttaagccaatatttactcatcaggtcattattttttacaatggccatggaataaaccatttttacaaaaataaaaacaaaaaaagcaaggtgttttggtataataccttttcaggtgtgtgtggatacgtggctgcatgaccgggtgggtgggggggagtgtctcagggtcttctgtgacctcacagaactgtcagactgtacagttttccaacttgccatattcatgatgggtttgcattttagctgcaacaataaaatttttttctaaagaac

SEQ ID NO: 1517 - protein, 431 aa, Homo sapiens
MEMEKEFEQIDKSGSWAAIYQDIRHEASDFPCRVAKLPKNKNRNRYRDVSPFDHSRIKLHQEDNDYINASLIKMEEAQRSYILTQGPLPNTCGHFWEMVWEQKSRGVVMLNRVMEKGSLKCAQYWPQKEEKEMIFEDTNLKLTLISEDIKSYYTVRQLELENLTTQETREILHFHYTTWPDFGVPESPASFLNFLFKVRESGSLSPEHGPVVVHCSAGIGRSGTFCLADTCLLLMDKRKDPSSVDIKKVLLEMRKFRMGLIQTADQLRFSYLAVIEGAKFIMGDSSVQDQWKELSHEDLEPPPEHIPPPPRPPKRIPHNGKCREFFPNHQWVKEETQEDKDCPIKEEKGSPLNAAPYGIESMSQDTEVRSRVVGGSLRGAQADAKGEPSLPEKDEDHALSYWKPFLVNMCVATVLTAGAYLCYRFLFNSNT

SEQ ID NO: 1518 - DNA, 2056 bp, Homo sapiens
gtgatgcgtagttccggctgccggttgacatgaagaagcagcagcggctagggcggcggtagctgcaggggtcggggattgcagcgggcctcggggctaagagcgcgacgcggcctagagcggcagacggcgcagtgggccgagaaggaggcgcagcagccgccctggcccgtcatggagatggaaaaggagttcgagcagatcgacaagtccgggagctgggcggccatttaccaggatatccgacatgaagccagtgacttcccatgtagagtggccaagcttcctaagaacaaaaaccgaaataggtacagagacgtcagtccctttgaccatagtcggattaaactacatcaagaagataatgactatatcaacgctagtttgataaaaatggaagaagcccaaaggagttacattcttacccagggccctttgcctaacacatgcggtcacttttgggagatggtgtgggagcagaaaagcaggggtgtcgtcatgctcaacagagtgatggagaaaggttcgttaaaatgcgcacaatactggccacaaaaagaagaaaaagagatgatctttgaagacacaaatttgaaattaacattgatctctgaagatatcaagtcatattatacagtgcgacagctagaattggaaaaccttacaacccaagaaactcgagagatcttacatttccactataccacatggcctgactttggagtccctgaatcaccagcctcattcttgaactttcttttcaaagtccgagagtcagggtcactcagcccggagcacgggcccgttgtggtgcactgcagtgcaggcatcggcaggtctggaaccttctgtctggctgatacctgcctcttgctgatggacaagaggaaagacccttcttccgttgatatcaagaaagtgctgttagaaatgaggaagtttcggatggggctgatccagacagccgaccagctgcgcttctcctacctggctgtgatcgaaggtgccaaattcatcatgggggactcttccgtgcaggatcagtggaaggagctttcccacgaggacctggagcccccacctgagcatatccccccacctccccggccacccaaacgaatcctggagccacacaatgggaaatgcagggagttcttcccaaatcaccagtgggtgaaggaagagacccaggaggataaagactgccccatcaaggaagaaaaaggaagccccttaaatgccgcaccctacggcatcgaaagcatgagtcaagacactgaagttagaagtcgggtcgtggggggaagtcttcgaggtgcccaggctgcctccccagccaaaggggagccgtcactgcccgagaaggacgaggaccatgcactgagttactggaagcccttcctggtcaacatgtgcgtggctacggtcctcacggccggcgcttacctctgctacagggtatgtttccactgacagacgcgctggcgagatgctcgtgtgcagagagcactggccgctagcccgatggtaggattcagttctgtggtgcatctgagccagtctcagaagaaacagatcaaaggtttttaaagtctggaactgtggaagggctaacaagagaattaaggatcgatgcactggggttttaaggagccctctggtcccaagaatataagagtctaatctcagggccttaacctattcaggagtaagtagagaaaatgccaaatacgtctgtttctctctctctttttttttttattcctttgtttttggaaaaaaatagagttacaacacattgttgtttttaacctttataaaaagcagctttttgttatttctggaacaaaaaaaaacaaagtaggcacttatgaaactttctcatacccttaggtgatgtaatcagccatataatttatatttgatttcccagggaaggaatcccaaacttttacgaatgtaaactcccttggagaagagggttaggacgctgttgcgctcaagcccccctcagctgtgtgcacactgagccaggacagggtctttgagctttccc

SEQ ID NO: 1519 - protein, 428 aa, Homo sapiens
MEMEKEFEQIDKSGSWAAIYQDIRHEASDFPCRVAKLPKNKNRNRYRDVSPFDHSRIKLHQEDNDYINASLIKMEEAQRSYILTQGPLPNTCGHFWEMVWEQKSRGVVMLNRVMEKGSLKCAQYWPQKEEKEMIFEDTNLKLTLISEDIKSYYTVRQLELENLTTQETREILHFHYTTWPDFGVPESPASFLNFLFKVRESGSLSPEHGPVVVHCSAGIGRSGTFCLADTCLLLMDKRKDPSSVDIKKVLLEMRKFRMGLIQTADQLRFSYLAVIEGAKFIMGDSSVQDQWKELSHEDLEPPPEHIPPPPRPPKRIPHNGKCREFFPNHQWVKEETQEDKDCPIKEEKGSPLNAAPYGIESMSQDTEVRSRVVGGSLRGAQADAKGEPSLPEKDEDHALSYWKPFLVNMCVATVLTAGAYLCYRVCFH

SEQ ID NO: 1520 - DNA, 1171 bp, Homo sapiens
gtgatgcgtagttccggctgccggttgacatgaagaagcagcagcggctagggcggcggtagctgcaggggtcggggattgcagcgggcctcggggctaagagcgcgacgcggcctagagcggcagacggcgcagtgggccgagaaggaggcgcagcagccgccctggcccgtcatggagatggaaaaggagttcgagcagatcgacaagtccgggagctgggcggccatttaccaggatatccgacatgaagccagtgacttcccatgtagagtggccaagcttcctaagaacaaaaaccgaaataggtacagagacgtcagtccctttgaccatagtcggattaaactacatcaagaagataatgactatatcaacgctagtttgataaaaatggaagaagcccaaaggagttacattcttacccagggccctttgcctaacacatgcggtcacttttgggagatggtgtgggagcagaaaagcaggggtgtcgtcatgctcaacagagtgatggagaaaggttcgttaaaatgcgcacaatactggccacaaaaagaagaaaaagagatgatctttgaagacacaaatttgaaattaacattgatctctgaagatatcaagtcatattatacagtgcgacagctagaattggaaaaccttacaacccaagaaactcgagagatcttacatttccactataccacatggcctgactttggagtccctgaatcaccagcctcattcttgaactttcttttcaaagtccgagagtcagggtcactcagcccggagcacgggcccgttgtggtgcactgcagtgcaggcatcggcaggtctggaaccttctgtctggctgatacctgcctcttgctgatggacaagaggaaagacccttcttccgttgatatcaagaaagtgctgttagaaatgaggaagtttcggatggggctgatccagacagccgaccagctgcgcttctcctacctggctgtgatcgaaggtgccaaattcatcatgggggactcttccgtggatcagtggaaggagctttcccacgaggacctggagcccccacctgagcatatccccccacctccccggccacccaaacgaatcctggagccacacaatgggaaatgcagggagttcttcccaaatcaccagtggg

SEQ ID NO: 1521 - protein, 331 aa, Homo sapiens
  VARIANT (1)...(331): Xaa = Any Amino Acid
MEMEKEFEQIDKSGSWAAIYQDIRHEASDFPCRVAKLPKNKNRNRYRDVSPFDHSRIKLHQEDNDYINASLIKMEEAQRSYILTQGPLPNTCGHFWEMVWEQKSRGVVMLNRVMEKGSLKCAQYWPQKEEKEMIFEDTNLKLTLISEDIKSYYTVRQLELENLTTQETREILHFHYTTWPDFGVPESPASFLNFLFKVRESGSLSPEHGPVVVHCSAGIGRSGTFCLADTCLLLMDKRKDPSSVDIKKVLLEMRKFRMGLIQTADQLRFSYLAVIEGAKFIMGDSSVDQWKELSHEDLEPPPEHIPPPPRPPKRIPHNGKCREFFPNHQWX

SEQ ID NO: 1522 - DNA, 109992 bp, Mus musculus
  misc_feature (1)...(109992): n = A,T,C or G
aactctgagttcaaggccagcctggtctatagagtgagttccaggacaaaaacaaacaaagaaacaaaatcaaaaacaaaaaatccaaccaaccaaacaaattaagaattgaaagacagctggggctccagcaagccttgccaatacaaagaccccgtttaaacaaaatacaacaagcaagcagacagatgtcatgtgttactattatttccaattcttcgtgggccagatactgactttgaggaattgggtgagctgggtgggttccaagagagggtagaattgactttcagggcagacgtggcttcccatgttggaatcttcagtgatagggacaagactaaaggaagacagggactgttgaggccctcagatatcagagacaatgaggagcctatcgaggatgaagtgtgttgacccaaggagaaaggagtgggcctgtgagagttgaggaatgggagggcagaatcgctgcagaagacaagcccgagtagaagggaagaagcgtgttcattagcccttctccaaggacgctcctcagtgggcccaaccagaggacaagtcactaggagttcaggaaggcaggccgttggaggccagtcctggacaataggtgaatagattgtactgaagcaaatcagtactagaacatctagtgaagttcccagctaaaaagcaggagagttgggatgctcactctgcctgtagaccccccccccccccagggcctttctaggatatcacctagctaggaaagacgcaagttcttacactcattgcttagtcagtccttcttcaggcaacagattgcactcactccttgcctactcctgcatatcttgatgcccatcccaaattaggaagactatgaccttgactctcccatctctagagtcttctatatgcagaagcattggacccattttggtcagtaagtctgctgaggaccacaatgacctgggctaaacagggatacagcagccactcccgagatgctacgagggagtgttggtgggcctaccactgaatcgtatcatctatgaggggtcatcataacggctagggttttttaaagctgtgggattggcattgtgtccatgggtataagtccctgaaacagtgtccctggcttgcagctctcagctctggcctgccaagtcccagctgctgctctgtgtcaagctgatgaaaacaattaaccctttccttcacattcttgattcccacctgctacgtgggaaaagaaatgctgagatttgaaggtccttcccttgtagtcctgccggcaacagcaagtagctgtctcatagccattgtagcccacagctacaactaactctgccagtggatatgctagtaagaaagctggagtcctggggctggtgagatggctcagtgggtaagagcacccgactgctcttccgaaggtccagagttcaaatcccagcagccacatggtggctcataaccatccgtgacaagatctgactccctcttctgatgtgtctgaagacagctacagtgtacttacatatgatgatagatagatctttaaaaaaaaaaaaaaaagaaagctgggttccaaagccatgagcgttggctctcagttttgggctagttgcctaaatatacagatagaaagggcattaaagtagccaggagccaattgacttaagcattaaggaaaagttgttctccttcactgatggagactgggaagtctaaggtcatctcttcctgctgcattcaggacacactcagacctggaaccagacagaaccaaactggctgtgagaagacagagagcccatagaagctctctttctttctctccccccttctctttatctctgtgtatgtatgcatgtatgtttgtgtctttgtgtgtgtgtgtgtgtatgtgtgtatgtgtgtgtgtgagagagagagagaacacaatacttggatatttgcaccaccccgtttcctgtgctttctgattggaattctgacactacttctgcaaatgagaaggttacaggatccactcatagttgcctggctgagggacagtcaccacctgtccctctcttggatcacaagtctaataaagacccagagagaatctgctctgtttctgtcactgtgcactcaacttctgagtgtaagtgagtgaataaaggaaagagccagtgctgaagctcatgagctgctggggagtgtgatcatggacttagtacattgaatatagcatgaactttctctttgttccccgtgaacattctaggagagttgggggggggggtagttgacacagccaggaagggtgaatgtgatctgaaaggaaatttttgtgattctatcaaaaagacatttacccctattgttcatggtcagagaagcaacctgcccatagcctcatctgtagggctggattactagcaggctggcttcctctatgttcactccctggaggccaaggcagtcaatggaatatcacaagggcatcctcagccatcaaaatgtcactctaaagacaggaaggacaaagcagttcctcattacataatttgacaggctttcatggaaaccaattatatctctaggtactaaggagcctccatttaatctccagtgcctttccccctttgtttgattggcaggtttttaattaatcatgattctaaaccacttcattatagatggcagtctatgcattagtaaactattccttaactgccttccttccaccttgaccttcttcttgacttgccaccctatttctgaggattctttcccaagttgtatggagtcacatctaggactgtactgcacacacctgaaaggtcagtgggaggtataactggagagacctgcatggcatcaggagggcttgcttatccgataccactgcagctagacagttccaggatgtctttggtctccttttcactcaccctgtacattgtccctacaaaactgcaaaccacctctcaagtcattgctcatgttcccattcattaccttcctactgtcccgtttctgtcacaaaggctgggaaggactaggtgggagatgaaacataaggcagaagagcaataataaacatggcataacaggagactagagtagaagattaacatcaaaattagcatatcaaggctggggcaatggctcagctgtcaagaacactggctgttctttcaatggacagggttcagttcccagcatccacatagcagctaacaatggtttgtagctccaggtccaggagaatccaacaccctcttctggcctccaaagagtactatacacacgtggtacacatccattcattcaggtaaaacacaaccctccccccccataggattcttttaaataagcatagaaaagacccagttggaagggataaagattagagcccttgtcatgtctcttcttgatccctcccctccaccttcttaccaaagccaacatgtaacaaaatatgagaaaaagaagcctgctgtacaagtgacttaagtgttccatcctactgggcctgtaaagatgtcactgatcttcttattcccttggtagtacactcttttaaaaaaatgtcccttaaactgggcagtggtggcacatgcctttaatcccagcattcgggaggcagaggcaggtggatctctgagtttgaagccagcctgatctacagagcaagttccaggacagccagggctatacagtgaaaccctgtcttgaaaaacaaaaaaccaaaacaaaacaaaaacaaaccccctcttctccccccaaaaagaaaatgtccttgtttctactactcatgtgtggcagtctaatttcttcccctggaatacaagaacctgaaaatcatggtggctacccacaagactctggcatctgtctatatataataaagggtactccatggtctcacttggatacctggagcaccttgctaagcattctcttaaaagcaacagggcacaggaacctgaggactcagaagagccaagtccttcattcaaagaacaggaggtgttggggatgaggagcagggccaggtgaggaggactgggagtttggtaggagagggaggggtaagggcttgatgggaacaagaaggcaaggaactgccctctgtgtctgtgggaaccagtttctccagggagggaagaaacaattctgctccattttgagggaaagataggaggactagaggaaagggaagagtagcccctgattcctggtaggaaccagaagtccaggctgaagctttcttctgagatcttagcgggcccaaggttgggggtgaagggagagaagttgcataaggcatcctggacccatggctatcttattaatggggacaaagggattgctggcaatgacatcaagaccaggaccccagacatttcttgacatcagtaactgccaccactttccagttactctcagacactacaggtctgttttcagagtgacctgccttttccctcttaggtctgagagccccatacagctccttctcctctgggagtcatcgaacagcagactggggaagaagctgtctcggatgagcaccgtatctttcatctagagatcttaaggagccttaatgacaagcacgcttcattattcctgcgttgtggatgaggacagtgactcagagggcttggcgagtttctcgttcacgctgggagttattaccagaactatgaatgagccttaggatgaagcttgacttcataaacctttaaacccgcatcctttatagtagtggagtttacaaaaataatgacccctttgcacttaagggttcatgcctttgttctgttagtaagtctgccttaggtggggcataagtatcttaggacagggatccaacttgaatccttcagtgtgaagcaaggtgggaaaagttgtatgttttattggtagtacctcgaccactcacagttcattgttttcatctattaacccacccacccatccatccatccatccatccatccatccacccatccatccatccatcctccctcagtgactcattgcagtgatacacacttcagtctctatgacatcacctgtaaaatagcattggcaaaagactgttttggaaattaagataatttctatgaagcatactgcctaacatatggtaaacctttaagctagctattatcattacacaagtaattacaagagatatatcaacacacacacacacacacacacacacacacgtgttcttgaacagccctttgtaggatggatcgggcaaagttgcagctgaaggagttaattcttgaggaagagactgatctttcacattaaaaactagaaatgaggatgcagtcctttagtaaataaaagaaggagagtcctgggtcctcactttagatcatgatgagtcagaagcattggaaagataataaatcaacatgagtcacttacagtgggtagaaatatggagacagaggacagaagtggggcgcagctttatatcctggagaggttagttataaagccctagtcactcacaggcttgtctttattccccgttgttcttccttagaatagaacaaatatctttgcaaactcttgcttgactcatcttccatcaggacacccgaaactcagtgtttaaaaaggagacagggtgggaaagttgaggtgtagcaggaaacgaaggtaccataaggaggaacaagcacatgggagacttcggaaggtctatttggaaaggaactggattggtatcattaggaagctgtcgactcctcctaacctcttgcaactctactcttctgtgtgagctaaaccctggatctgaaatcctccccaacccagacacaaaatccagaagctataaagaaaagccttccataagtttgactggctgaaaaataaaaatgttcgtgtgaccaaagatacccaaccccagaaagaaaagccaaagcctgggagaaaatcttcacaaaatgtgatgtattttaaggatatattgtaacaaggaggggcattctcgatgctaagggactcccacaaaccactagggaagaggcaaagccaacaaaagatgtaaacaggcaattttagaagaaatgggcatctaaaatactcacgtccagtagtaattaagagaaagcaaaaggaaatgggatagtactgttttcaattgtttaatggacaaaattaaaaacatttataatactttgcattggcaaaagtgtaagcatggatgacaacatgagttgatgtgtgtgtgtgtgtgtgtgtcacaacacacaggtgaagatcaggggacagttctgtagctgtggttcttgggttcagactcagatggtcagactttcaaggcagcctctcctacacactgagctccgtgccagcccacagcatttttttttttcttttggtttttcgagacagggtttctctgtgtagccctggctgtcctggaactcactctgtagaccaggctggcctcgaactcagaaatctgcctgcctctgcctcccaagtgctgggattaaaggtgtgcgccaccatgccggcttagcccacagcattttttaaaggatagttttgcagtagctgtggttttaaaggctgttttgttaaatagtctgcttttaaggaattagtctcatccacatctccacacaaaggcaaaagaacaagaatggcaatagcaacatgaaaatatttattattattatttattattattattattattattattaacttggtttttagagacaaagtttctttgtgtagccctggctgtcctggagctctctctgtaggccaggctggcctcgagcttacagagatttgcctgcctctccagcatcaggattacaggcatgtgccagcaccacccagcatgaaaacatttatcaagggccagccagcaatcagaaccctaggactcagagaacttaggtaactgactcaggatcacacaggtaacatgtggtagtaacaggtagctcaggcatttgtccccaggggtatcagctgagtcattggttctcaacctgtgggtctttgcctgtttgagtgttaaatgacactttgacaagggtcccatatcagatctttatattatgattcataacagcaacattaaagtcatgaagtaacagcggaaataattttatggttgggggtcaccaaaacgtgaactgtattaaaatgtcatagcgttaggaaggttgaaagccactatgctgagtcattacatcagccccccaagtcttctgtacctaatggttatctgtagaagtttgtgtatcttgttgagtactactgtttttatttatttagtgttttgtgtgtacgtgtatgcatttagatacacatttacatgtgtgtgctgatatatgtggaggtcacacattgggtgtctttctcaattgctttgcttatttatttattttggcttggctggctggctagcaagcctcaggggtcttgctgtgtctgcctccccaacagagagattacggcagactttttacatgggtgctggggattgaaatcaggtcctcgtgcttgtatgataagcactttactcatcgaaccatcatcttagcttcctattttaggtttttctgagatccagttacctatagaccaggctgacctcaaacattctatgtagctaaagatggccttgaacaccctccccccacccagcccccattctcttgcctctactttctcagtgctgagattacagaggtgaatcaccataccagggtactgctgttcttttaaaacaaggtctccaaggcttgagatcatggctactccgccaaagtccataaaaacatatagccaagtcatttcaaaattaatttgtaactggaagatcacaatgttccttttgaaagcccattatactatcaccaggaaaaagaacttgtaagatctgtaataatgattatctaattatcatgctccagtgcatgggtggaaagagtggttagctggctctactttcctagctttgggtctgtggacttatgaagaagtaaatttacctacaggcttgaagaacttttttttttttttttttttttgacccagaggccagttttattatctacaagagaaagggttctcttcagtcatcaaagactcttcctgtcttaatccaagtcagaggggcttctccccagaagggcagatattttttggacccctgcgctgggtgaagtgcatgcaattttggccaggccagggctgtagcctacctgcatatttaccttgacaccccagggagctctacagttcactattcaggggcattacactctagcttccataagtacaagttttcaaatttaaaaattcaatatgctttttagcatttttttgttgttgttttcaagacaagttttctctgtgtagctctggttgtcctgggactcattctctagacttaggttagcctcaaaccctcctgcctctgtctctccccagagctggcattaaagacctatgaggccaccaccctacttgacatctttagaagtggggggaaaatcccattcagttaggagcaagtgtgttctctcacttgtttagctgctcatttcaaagtgttcataatcccctttgcattttttcacttccggtaaattttccctagtctcaaccggcttgcaatacccgtaggattcttcccgtgaatatgacaagagcttgtttggattattcagctgctggaagattgggtccactcccagggctttggtcattgcgaacattctgaatagccctgctgtaaacatctccacgcaaagtcctcctcttttcggatcatttccttgcacttggacttccttaaatggccttactgggtcaaaggggctctgtgaacagttttatagctcttggcacatagttttccgattgcgccctgagaggatctgaccaatggctagggggcaaggagagggcaggaatgcggagaagcagcccctctctttcactctccaaaagcaagggccccgcggatgcagaagcgcttccttattgcctcctgttccctccgcctggccagtgtctaaggtctaaggccaggcggacaccttggtcagggaagggcacaaaggtttctgagagtttaggatttatgacccggaggcagaaacaactcctccaagcctcccagctccaggactcaacaggattcaaacgagtcccacactcttagcgcgggctaggggcgcggcctccccgccccctgggagccccaggcgcaggcctcaggcgcaccaggcctgggaagggcgctgacccggggcgcagcagttcggcgcggcttgcatagctgcgcgctgagtcagcgggacacagcgggcggggggcgcggacgtcaactaggcctctgggtccggccggcgacgtgggacacacgacggggaccacggggcaccgcgctgccatccgtcccgcctcccagtccctcgaacgggcccgacgaggcagggagactagccaggcggcgggaacggaaaagaagcctggttgctcagcccggtggcggggcgtggnnnnnnnnnnnnnnnnnnnnnnnnnnnnnnnnnnnnnnnnnnnnnnnnnnnnnnnnnnnnnnnnnnnnnnnnnnnnnnnnnnnnnnnnnnnnnnnnnnnnnnnnnnnnnnnnnnnnnnnnnnnnnnnnnnnnnnnnnnnnnnnnnnnnnnnnnnnnnnnnnnnnnnnnnnnnnnnnnnnnnnnnnnnnnnnnnnnnnnnnnnnnnnnnnnnnnnnnnnnnnnnnnnnnnnnnnnnnnnnnnnnnnnnnnnnnnnnnnnnnnnnnnnnnnnnnnnnnnnnnnnnnnnnnnnnnnnnnnnnnnnnnnnnnnnnnnnnnnnnnnnnnnnnnnnnnnnnnnnnnnnnnnnnnnnnnnnnnnnnnnnnnnnnnnnnnnnnnnnnnnnnnnnnnnnnnnnnnnnnnnnnnnnnnnnnnngttccgcgggcggcgctaggcccggcgaagcggcatgagccggcccccgccgacggggaaaatgcccggcgcccccgagaccgcgccgggggacggggcgggcgccggccgtcagaggaagctggaggcgctcatccgagaccctcgctcgcccatcaacgtggagagtctgctggtaggtgcgggctagggagggaactccccgccctgcctggtcccccctcggcccacccgcccggcttccggctgcccggggagctggagacccaggttccagagtggagaccccacctgggattctcgggtccacctccctgccgagcgagtgtcatctcggccgcccccgttcttggagcgcgcggggaggaaacacccctggtctccttcccgcctacccagttggtttggggcggaaaggtggaggattggctgtgcttcctacactgggctacccaatttgaaagtgtcacgcagtgtgggagctagggtgaaaacccagggagaaagaaacccgacgctctccctattgggagtaccaccgggggcacacgacaaagagctcgtcaggaagctgggaacgcacagctagctcaagtttgctgctttcagttgctcttggacattccatagtagctatttagtacatttgaatttatgtaaattaaatttccggagattgttgctctgaagccaagaaatgagtctgaattgtagaatgggataaatctctccccttcatcttgtctttcccatagcattcaaaatccaaattaagagccttggaaaaggcagctaactggagctcggttaagaaaagaacacgatttacaataaatgccatgtagaatgctggtatacttctggtcgtgttgagggaagcgattatgcttggcaaacgaatttgattagtgtgcacctagagttgcatttatgggaaaaagtggtgtgaacgtgtaccctgaggagaagtcggaaaaaaaaaaaagatactccggctattagctttggaggtctagacttagggtgggtgatcaggcattctgtgccaaaaagcatgtcagacctgagctctgctaggagaagcctagtgactctgtgatgagaaaaactgtctcctccctttccactgactaacttttcttctgaggccgttggttatcctttgaggtttctggaatcatttgcagagtgactcagttctgtttggccacagcgcaggaactgactagagtgtgggtatcgctctataggatgtgtaaatatagagattttgacttttgggggcggggggagtgtttttgtttggtagtgggttcctgtgttcttgtgggacgtattttggaagtcttcagagcaggattgcttggagttcatagcctttttgtagataaagcaaagcttctctggcgtcactgccaggattttcactttggtattttgctagcaaaactttgatcctaggccagaaagttcagttaaaaatagtctctgtaaatctcaagtattcaccaggatcattttcaatcccagatagaaatgtttttacatttcacagtcatctcttgtattattagtgatgttaattatcattatcagggtcattttgagcttggaaccaagttgtttatacctgtgacatgactattttgttttattaaaatattacctaaattattacacgtggccagtaacagttccttcattgagtgcttcatacaccacatttgttaaggtgacatattacccttaggagggttgacatcaaatgctgatttgaccgcaggcttattgctgcttttagttgattacatgtcattgagaatcaggacaggtgttattctagagtgcagcgtatgttactaagccaaaaaatgccgtttattcctttagagtgaggttcctggtgcctctgttgcatattcataaaagttgaaaacatcattaaagttgtaataatatccatgttatgtaaattttatcatgaagttttagaatgaattttgtgctgggtggttttatgtcaactctacacaagctagagttatggcattttcttacttagtgattgattcgggagggctcagcccattatgggtggtgccatcctttcgctagtggtcctgggttctttaagaaaacagactgagcaatccatgggaagcaagccagtaagcaacacccttccattgcctcagtatcagctcctaccttcaggtttctgccctgtttgagttcctgtcctgacttcctttaatgaggaactgtgtggtatggaactgtaaaccaaataaaccctttcctctccaaattgcctttgtcatggtaaaattttaattgtagtagtagtatacataaaccttgccatttaaaccgtgttgaagtccacagttgggtgatgctatgtgcattccctgctgtgccagtgatcactgctatgcatactcacagccttttcattctccaggttgtaactctgtagtctttacactgatactatttttaaaattatgtttctaaaaatgctcacaaaataatagctgttaccactttaaagatttgaaatcttgccatgagctttttttcacaattaaatcattactttacttaacattacatttcttttggttttattctagaaaacatacctttaataatctaatacaaacagcctgaaatttagttactgtattcaaaagcttagaaagcaccattggaagttgtgtattgctaaatatggcaagtgatgatgaaacataccagaattttctataaaacgttttcagtaagctaggcaagccattcataggaaaaaaagttacatgagatagcatgtaaggttttagtccagtgtatggcatatctttacactcattttacgtctcctatgtgcatttgacaaattttttgctagctttatgttttctttgagatgggaaatgatttttgttttagatattattacagttttcaagtgcatgcaattatcgttttgagtttgctgtcataagtactaatcattgtcaaacatatatatggcgctgaatttcaggactatcagtgtacaaactaaattatcttgtttctctgcagaggctatttactttatttgcccttaaaatatgcaattcttttgaaattgtagattgtgagctgcttggtattatataaaaatagttttgagagatacttctgaaattaaaaaacaagcaacatctatcttttgtgtttgagtgtgtgcatgtgccctgccatgtgtagaggttagaggacaacgggtgggagttggttctctcttctcatgtgggttctagaggtcaaactcaggtcatgggggttgtcaggcttggtgacttgtaagtacctgtatctgccgagcctcttttgaaggtcagtaattttgaaatattttaaagggaggatcttaagtgataacctttggtaagttcctgtgttgtcagagatccttacattgcttgcctgatgtgttttacttaactaacatgtatgctggagaaatgtcttaaggtttatgccttgggattttattttgttattttaaagagtatgtggctatagtaacctatatagtacctaggcttttgtgaatggataaaggtgatcaaacatttatttacaatttcactgggctgagaaacaaaataccaattaaaaatttaaatttacatttctttatttgtgtgtgttgggtggggtgttttgtgtcatggtacaggtatggaggtcagggaacagtttacaggagccagttctctccttccactgtgtggattccagtaatcaaactaaggctgtcaggcttggcagcagctgcctctaactgctaagccatctgcctggccccagaaacacctattaaaactggtacctgccagtaactatatgaaaatattactgtacagaaattttatttttgatagttctggatattaaactcaagtccttgcacatgcttgcaagtgtctgcctcagggctatggccccagatcatgaaaatatttatcacagtacttaggttctttccatttagtgctgactcttcacccaattaagatacaattgcatgtgtgttcactccccataagtaatgtctgagactgttttgaagatgtaataaaaatgaaataaaataaaagatgaaaaatgactttgtacttattatttgtgtgaagtaggaggtggatatttagaatatacagattaattgctttaaaacttaatttttgttttgttttgctttttacatttttttatttgtgggtatttaagtagggagctgaggaaaacttttgagagttgattctctcttattgtatggatttcaagatccacagtttgtcaggctaggcagtagtgcttattcctgcttactgagctatttataatataaatataaataaatttaataaatgttataagctgggcatggtggtgcacacctttaatatcagcactcagaaagcagaggcaggtagatcactgaatttgaggtctacagagtgagttctaagccagcccctacatagtgaaattttgccttgaaaaattgttagctgggcgtggtggcgcatgcctttgatcccagcactcgggaggcagagataggcggatttctgagttcgaggccagcctggtctacaaagtgagttccaggacagccagggctacacagagaaaccctgtatccaaaaaaaaaaaaaaaaaaaaaaaaaaaaaccctcaaaaaattgttataagcaattagtgttaagtcattgtaaggactttttctcttctttttctcttgtttctcttgggttgataatgagggtagaattgctgtgtcataggatatatatatatttgttttttaggaaatgaccagatcattttaaagtagttaaacattttatattttactctagtgccaacaacacaggagggaagattccagttattccacagctttcctaacattagaaaaaaaaataaaagccctcctgttgtgggtaatagctcattgtgttgtatttgcatatcctgatgactaccacacatactggctatttatatataaatatatgtgaatcatctgttagagtatatgcccttttgaaaagttgggctgtcatacaagtttttatgtgctagacatagaaatgaatttgtatacaaagggaatgctgtgaaaattgtcttgtgttttttctcagtctgtggtatgcctgtttttaaccagtttaaaagatggttattgcttttttctgcccaagttattgttgcctagacctatggtatcgaaatacctttttttgtttttattctagaatgtttatgatttaacatttatatataggtctaggatacattttacctagtttagtgtgtggtgtgagttagggattgaagctgattttcttttttcctccacatgattagttactcagactacttagcagtattattatcattattattattattaccattactattctactactactattttgagaaaagtattttttcttttttacagagttgcttatcatctttgccaaaaatctgtttactagtagacttttgtgtgttttcttaatagtcatcttcagatacttagtcatggttatgttgtctaaccaagctttgtttgaaactcatttctttttagttttatctgtggaaatgggcagccagccaaccatgactggtaagataaaaagcatcttagatttaaaaattattctgtactggctgctcatgaagagggtaattggggaagagaaagttgatggctcagttcaacattataggcccaggatgacatgtcattgaaaatccagggaactggtggggtgactcagttggtagaggtgtgtgctaccaagcctggctagtgaccttgagtttgattgctgggacccacagggtgaacaaagaaatgactcctacgagtcgtcttttgatctgtacatgtgcactgtggcacatttacacaagaaatgtaaacagaacgagacaaaaaaccacagcccacaaaagcatacttatcagtagtgggctagcttatatattacatgaagtttaatatataaattagtatccagtcatggtggctgtctgttctttatccatgctgggagctgctcttgttgcatccgtgcttttcttatccttcaaagtgattacttcaatgtagatgttcttagacggtctgcagttggcttgttttaagtgaccttcatttatctttctggagaggtctgttcacattggctagtctcattctcatattctctctttctctttcatattagggttgctttttggttcattggtgttaactcttttggagaatatttctaaggactttatgcttgttttccaggcatctaaaatgctttacaactggtcattttatatttaatgcctattttactttattctgtaaaagatttttgaacaactttagttatgatgtatgtgataggaaatttacttttaaggggttacagattgggaactagtttccagcacttcattattgaggttaacctttagctctggagatgagaagcaagcctgttttaatacttgagtaaatggtgatgaggaagtcttacagtgttaaagtattgtcttttttatatttcctagcctttgaggttatttatttaatttacttattactgttgaagtcaagagctcaccttatagctgcctggtctttgtagcccacgctgtccctgaactcatgaacctcctgctccagccttctaaatgctggggctacaggcttgggggaacaacacttggcttgtgagtttatttttacttaatgcataaaaggtaaactgtattaggatatagacatttttgtatgttccttagctatttgttgaataaaaaaaaataattcagtttaagtgataagagtaatatctttaaaggtatggtccctctagaagtgataatacaatagaccccaagtattttgatatgttcttgtcatttggacatagtctattcataagaaggaatataggcaaacatctgtatgctgagaagataggtttggaaggttagaacagttggtctcctaggaaaagtaattgtaatgtagacattttctagattgtactgaaacagtgtgtttaatgagagataaaagctaattttgttctgtattttaggtgaatttaagactatgtgggctaaacagcttttaatcatttgtgtgtcatctgttcccttgccctagcttctagttaatcaatctagttccacgtggagcccagtgattttagtgttaagtcagcttttcatgatcaagaacagatgaaaaaaatggtggtatgtttcaggttaaccctcaaaacagtatgtatattggctgttagtaatcaagaaatatttgcttattaacaaaattaaaataaaaatcagaggcacgagagattttgttcaagaatgcaagtgtctcccagcactagggatgcatagacggacaggtcactgagttttagaccagcctggtttacaaagtgagttccaggacagccagagccatacagagaaccccaatttcaaaaaacccagaaagagagggaaaaaaatctggatgtcattacaagttataatgaaagtctctattgaaaaaatttcagatagtaagcatattataaaataactttattatattttatatttatttgtgggtatgtgtatatgtttttgacactcagaagtcagaggacagtttttgagtctctccttccttcagggatcaagctcaggttgtcagacatgccagcaggtgcttttacacactcaaccattttgtcaagtccatgattactaacatttttatttaacttttatctatttaatgtttataatgtttctttttttaataaatgtaatttgcttgttctatacttaaaatagttacagaaatgagttttgagttactctttctgttagtggtgttcaattagagaaggggagtaatatataatactctatttgcttgtgtatccttcataataatgggttaaatatataaatataatttgcaggcatagacagtgtgcatacttctatctcttatttgttcttagaatcaggtctgaaattaaagtctggctgagggacagatgttaaatgataccattgtttgctagcttttcaagttctttgtattttcatcaggattgttttgggggtagccctggcaatcctggaactcttgtagagaccaggctggccttgaaatcacagagatccaactgcctctgtgtcttgagtgctgggaataaaagcttcattgaggtatacgttatatgctgtaaattcatccattttacatctgcaatttaattaaactgtcaccttaacatgttctcattacctctaaaattctttttttttcttcttcttcttcttcttcttttttttttttttttttttttttttggtttttggtttttttcgagacagggtttctctgtgtagctcttgctgtcctggaactccacttctgtagaccaggctggcctcgaactcagaaatccgcctgcctctgcctcccaagtgctgggattaaaggcatgcgccaccacgctgggttacctcaaaaattctattgtttaggttctcagtcttgactccagtgctagctctggatctgtatctataagtttgaattttttaaaaaaacaaattctacataaatagtatcatacagtgtattagttacttttctgttgctgtgataaaacactatgacaaaggtaacttgtagaggcaagtttattttagctcactgtccagggggataagagtacatcatggcaaaggaggcatggtagtaagtggcaggcatggaagcaggagcagcaaggtgagagagctcacatccccaaccacagacaagaataaggagaacaaactggaagtagtgtgaggctttttactctcaaagcttactcccaataacgtacttcttctagcaagactccacctcctaaagcttccccaaatagcaccaccacctgcggttgttcaaatatccacacttgtgagggacatttctattttaaactgtcacacacaatatgccatcattgcatctggcttctttccccagtataatgtttttagttaggttcatctgtattgtagcatgtgctagcattttgttctttagtattgctgaatggtgttattgtatgaattatattcattttgtttatgaatttatcatagttgaggacatgtttttatttctcttggataggttccaaagaatgagattgtagggtcatgtggtagtttatgcttaattttgaaaagctgccaatattttctaaaatggccatacaatttcatagtctttccatcaatgaatgatagtacttgcagtgtactttattaataacaaatgaattttagttgtgtcctttctttaagaaagagagaaagagtgagtttcttcctgtgttgcctaggttgaccttgaactcctggactcaagtaatcctctggcctcagcctctggtatagctaggacaaagggcatgttttaccatgtcttgattgctcttctcttttgatttttagtagtgtaccatggtgtgctgtatatatttaaattgtttttatgtaaggagatgctaatcaagtaatgagaggttccccctccttcacatgagaatcttagttaacaagcatttattttttttaatgaacttcgttatggagcctttcacttctgagtaatgaaattcttgttgaactttgtaaattcttgtaggagtgactcaactagttggtttttttttttttttttttttttgagacagggtctcactatgtagcccaggctggccccaaactgtttttccttagcatcctcagttctaggatcacagtcaacgtaccagcatattttgttcaattatttttaaacaaaatattttgaggactctgatgtaagcatagtctttccaacttttttggatttttgttttgggttcatgttttaatttcattttaaactgttgttaggaataagtttataaacagtctgtcatcttgaccacagttagagtgctataactttcttttctgcatacagattagaaacaactcttttttttttttttaagattgatttatttattatatgtaagtacactgtagctatcttcagacacaccagaagagggagtcagatctcattacggatggtagtgagccaccatatggttgctgggatttgaactcaggacctttggaagagcagtcgggtgctcttacctgctgagccatctcaccagctcctagaaacaactcttattgtcactctaataactagttttctttagagttatgataactgtcatgatgtaactgttgcattggttttgtctttgaatactctgaaaattcgcataacatgtccactcttgttcacaggtggcattgcatgctgatttgtaggtttatattatttggacatttttcagtcttctcagatgattccttatttgaaaattctttttttgtttgtttttgttttttgttttttcgagacagggtttctttgtgtagccctggctgttctggaaaccactctgtagaccaggctggccttgaactcagaaatccgcctgcctctgcttcccaagtgctgggatcaaaggtgtgcgccaccatgccctgcttccttatttgaaaattctatatttgcataggactttagtattttgtcttttgtttaatcatacctcatctagaagccatacttttaattgcttaaggtttttattaaatatattataattgtttgaggtttttattaaatattaatatttttattaaatatgacccttgcttttattaagattcagagggaaattttagcaaattctttatttagatttttttcttttatgttaaactcatgttaaaattacttttggttgtagtgtttttgtttttaagactattcagagatatcctctgcctctcaagtactgagtttaaaggagtgcattgtgagtgtgctgtatatatttaaattgctttaatgtaaggagatgctaatcaagtaatgaagagagtcgtccccccccccacacacacacgagagtcgtagttaacaagcattaattttttaaaaaataaactttgttatggagccatttacttctgagtaatgaaagagtcttgcagaactgtgtaaactggtagaagcagagttggcttgtgtgtgtgtgtgtgtgtgtgtgtgtgtgtgtgtatgtgtccctgtgtcctgtgtgtgtgtgagtgtgtatcaaaaatataaaatacattagcatagttggcttgaactgattctttcaagagctactgaaaatgaattttggtatgttgaattcttacaaaagcgtctaaagtatgaaatatggggatcctaccgtgaacaacctctcttggggattctccctttagagaccctcctgaggagatccccccagccctctgtcaggtctccagaggtagccaggactttgcattaaaggaacatttctagtggtagtgatgaaagtggcctaaggaataagatgagaggcactatggataatttttttccccttgtactaagtgaaaaaaaatcagacacaggtgtttaagatcttttcagaagacagacttgtgtatgtgtctgacatatagaaggatgccagggtcatcacgttttgccttttaggactctctacaaatcagattaaggctagccagattctctgctttctctctgttccttcttcctcccttaatttgctgggttttctttccttttaaaggaagcataagtgtaaaatagaaaaagagatattgtgataagatatacaaaataaaaaaatgtatcattataccttacccaagtttaaagatactgtgtaaaaacgtattgtaagttaaaaacttacattaatttatatgtgtgtgtacacatgagtgattatgtgtaggacacacatgccacggtgcatttgtggaaatcagcacaacctttggaagtttttttttttttttctttttttttctttcaggccttgaactcaggtcttcaggcttggtggccagtgccttcattgcatgagccacctcagtggtctcaaatgtataactttgttatgagacagagggtgaccttgaacttctgatttttttttttttaattctgtttattcttttcctcttgacagaatttcatgtatcctaggctggcctaaacttgcaaatgatgaccttgaacatgtgttctcctcccctcccccccccccttctccaagccttgagattacacaggcctgtgccatcatgccccattgatgcagtgccagagactgaagccagggctttgtccatgttaataagcaagtattctactaacagaactatagcctaagctcaaaacacgtaactgtgatatttcacatttaataattaggaaagtgaaaaataatggtagtcatagttactgagtcagcttaattcatgaggaaaaacccaactagaaatttaaattttaatttatgctccttcaaattatagttcctaaagcaatgtgttctgtgtctatcttgtaattatgcctatatttaaaaaacagaagttttcaaacattcttttgtggtaacagcagaggcaggtggatctctgagtttaggatagcctggtctacagagtgagttctaggacagccaggtctatacaaataacctgtctcaaaaacaaacattaaaccaaaacaacaacaaaaaggaagcaaaaataaagtgtaaaatacaatccttatttttaaaacaattttgattttacatacaaagcagcttttgagtcattggctgtaccaagcaatacagagagtgctctttatattttttaaaaaagatttatttatttattatgtgtacagtgttctccctgcgtgtatgcctgcaggccagaagagggcaccagatctcactatagatggttatgagccatcatgtggttgctgagaattgaactcaggacctctggaagaacagccaatactctccagcctgctgtttagattttttaaatgtacttttgaaattggttccccatgttttttagtcctcaaagacatttaatactttagtttttgttattaaggaatatgtatatattatcttgtagaaatttgagatacatattggaaattaaaaaaaaaaagtattgaagctagagagatggttcagcagttaagagcactgcccactcttccagaagtcctgagttcaattcccagcaaccacatggttgctcatgactatagtgtgatctgatgccctcttctggcatgcaggtgtacatgcagatagagcacttatatacataacataagtagatcttttttaaaaagtgtcaattctttttaaacatttgtatgagtgttgtgtatgcaagtatgtttgtaaaccacatatgtgcctgctgcccttggaattcagaagaattcccggaactggagttactggtagttctgaactgtcatgttggtaggaagtagccattgaacctgggtcctgtggaagaatagtcagtgcttctaatagctgagccatctccagtccatgtatattaatttttgagataatgattatataacttggaggagagtggcaacctgatttttgtatttaacatttgaactaccatggctagtaaagctgcatacacttctggccaatgtgtaattagtgtttatgaagtactcagctggcacagtaaaataagctttatagttgctaaccgttgatttggaggatatagctgaattggtagagtgcttgcctagcattcacttaagaatgggcttaaacccctgcaccacataaaatctgcacagagggtgaaccttagcactcaagaggccaaggtagaaagatcagaagttcaaagtcatctttggctctgtagtaagtttgaggttgggctgggctctgtgagatactgtctcaaaagaaaacaaacaataaagccccaaatacttaacttttttcgtttttatagcctgtctacatagagacttccaggctaattagtactacatagtaagacgctgtctcagaaaataatcaatacaataatgatgatgatgatgaaaaatatgatttgaaaaacaagagaagactgtaaagttgcaaagtttggagactttctggaaaacaagttgttttccatatgtaagacatctccataataggagaacagatgataaaattaaggctaaatttagagctaagaaaaagaaactagctcaaaattgatttatgatagtttttttttttcatgagaaaagttatagaattctgtaattttaagaaattctaccactccccccagaggaatttttggaaatttttgtctcgagattctgtgagtaagcctcttgccactatgctttaatatttttaggaacaggtttcttcagttcgatttagcaaaccctcaaaagcaaaacaaacatttaaaaaaattacaaaagcaatacatgcctgttaaaaattttaagaaatgtaatatataaccttttgtctgtggcccgtgttattgaggcagtagactgtgatactagtgcatccctcttgctgtttgcatttaatagcattatttttcttttaatctcatgcatataaaatcatgactgttttcccagatagtctcatcatgtagtatttttgttttaaaaagagcattattattaactctgcatgtgtgtgtgcgcgcgcgcacctgtgtgcctgaaggtgcacatgagccatagtatgtgtgagtcaattctttccttccaccctgtgggtcctatggattgaactaaggtcatcaagctttgcatggcaaggacctttcccatcagtgtcagcacagtctttttttaatgtacagtttattaatattcaaaacactgatttacacaaagtctgggtcactctggacaggatggaggtgtaagaattgattctgaaattggtggtatctgtttatttttattttatgtgtatgggtgctttgcttttatgtctttgcctcttgcctgcctagtacccttgaagggcagaagaaagcattgagacccctagtactagggtaacagatgcttgtgagccatcatgtgggtgctgggaatccaacccttgtcctctggaagagcagccactgctgtaactactgagccatttctccatccctgccagcacatactcattagctaacagaactcatctaaatttaatttggctctttccagagaggcctgaattttttttttttttttttttttttaagaaacagacagaccctttccgaattacaattgttgcaggcactagctgattgctgagatgcctgtttttctccttcatagagctcttgggacttgttgtctgaaccaccagcttaattctaatttcatagctgctgctttctgtttgatgtgtaagtcctgagacacttctgaggtcagtcttttccctagttgttcttctgttctcagtaaagtttttctctcttgttctgaggttgacatacttgcttgcatcttcaaattctttcccaggtatcaccttctccattgccttaagtacctgtttctcccaaggtagccttctttcagaacttggagcttagggtcctttcaatgtagggtccttttaatttcagtgcccatgatatctttgtcttagaatttctactcagtctgatatacttctctctactatcacttgttgacatctttcttgtcagtatcttaattgtttgaagatgtaggcatctggctcacaggttttccacaagtgattggcactgttcctttgtgtgaacttagtgtttacgtggacaggtactcaggaccctggctttcatctcttaattccatcatcccttactctggtctttctcatcacttaatttactcactgattctatggaaatgacctggatctcaccattacctgaaatccactttgctgttcagatcataaatgtaaaacatcacaatcccagtcctgctctaagcttctttattattttactaccttatttttttttagatttttgaggtgtaaggctctaagctcttgtaaatgctcccttcactagtatgtaagagtgcagtcaattcaggtctcttgctacaaccctaagttttcttgaaccattgaatatccactatatgcatctggagcaatcaatttgtctctgatctacacaaaaggtgtttgttgattagtgatggaggacagacagacaactaattggattagtaacactgcacacttctggactccagcctctgagagctgttaagactgtaggcttagggtaattctttccttagtctgaggagctttcattctttcaatttagaaacaaagtctcttccacaggtggtgttcctgtttcctggaaaatagaagtcatcaatagaagattcccttaaatttcctgtcacttgacccaccagtttatccttttagtaccgttcattcttcctttccttctgtttccttcctgttcagcttatcaggacgattcctcaactgctttgtattgtttcttctttgttcttgctgataaactctgattgactttaatgtctttcctaattctcctaattttgttaatgatgttcagatgtctcacagaaacaaaataagttaccaaactgcccttagaaaaataaacctctttttttttttttttttttttttttttggtttttcgagacagggtttctctgtatagccctggctgtcctggaactcactttgtagaccaggctggcctcgaactcagaaatccgcctgcctctgcctcccgagtgctgggattaaaggcgtgcgccacatagctgttaaagcttgtatctcttggatctgcttatttctaggacttgcttgatggtttatgtttgatgacttctgttttatccacctgcttgcttgtgttgctaccttagactgagatgcatttactgctggcatctcttcttggttcactacagtctctcagaggttagattacaggcatattcctttccctctgcttgccagtctgctatgatttgctctcagattcggtgatgatttcctctatcgcttctcctgggtcaagccagaaacaactccctatcttcactgtaaccttcgctatgtttctcagcaaattattcacataataatccaataatgtgccaatttgatccccacaaaggatgagaagagtggcattgttttccacatcttttaggaaaggtgttttcttttggtgcacccatgcaaatctctaagaaattgggcactggagacccaagaaagggcaacactctgtgttagatctcctttcttatcacatccagtgtactgtgtctctcacacatggttgttttgttttgtctctagaattttaactttctgtaaatttgtaaatttgacttacctcgtaccctatttctgttagatatcctcagtgtttcttgaactttaagaaaatgtattgtggccagataaacggcagaattttccacctgtgccactttaaatgtgcaattcagtggcactacatacattcacagtattgtgcaaccatcagcatgtctatttttaaaacttcattacctaaaatagaaatatctattgagcaacaactccctatctttactgcaacctttgctatacttctctgcaaattattcacatggaatcattcagtatttgcctttgtgtctagtttacttcaagacccatccatttgcattactctttgtattctatagatcttgtgcatgtacggaatatagttacatatttaatgttcttgatcattatgttatcttggtttgcagtcatatccatttcatactattctgctcagtgtgtattgaattttccactctggcttacaagtactgttttttgggttgactaaatgctgctaatttcaacaacgatttgttataaggacccttgggaggaaaaatgaatatttacagcttgcatttttcttaacttactagattttatggtatgtaaatggcagatattagaccttactttacacatgtaaatatgatacatgtaaatattatatgtgaaacattggaaattataatgtgttggttcccacaagtgtactttccagtatatgtaattttaaaccattaataataatattttagtgcatttaacaagtaaatatgtttgagtgaataatggtaacaggaaagacagtacatgcagagttggacttgctttctttataggacatgtagacaatacataaactactcacagttactgtaaagagagatcaaaggaaagacagtcacaattgtgaagtgcaaagacttttatggccattttgttgttgtatgtcataatgctttattcattcaacaatacaccccttttcctacatactaatttgtcaattaatcatcacaatcaagataggcaatgctgctgggtgtggtggcgcatggcaggcggatttctgagttcaaggccagcctggtctacaaagttagttctaggacagccagggctatacagagaaaccctgtctcgaaacccccaccccccaaaaaaagataggcaatgcttttattactcttaaagtgtcctcattttcttttatggtctgtcccatctcccatgtcctctaacaatttaattttttcacgttgttaattgcttctctcttttagaatttcttaggaattaaaacctgtagtttttttttctcaaatatttatttatttattatactgtacactgtagctgtctgcagacacaccaggagagggcatcagatctcattacagatgttgtgagccaccatgtggttgctgggatttgaactcaggacctctggaagagcagtcagtgcttttaaccgctgagccatctctccagccccaaaactgtagtataaaagcatattatttttgtgtatatttcattttgcattttttcaattcatccatatttgtcaaaacttgtgcagggaatgaaaagtaagttaagcattttatcaattctggcagaagacctgggactttgaagtcagacataagtgacatcattaaccttggacacagtagtagccaaagctacatatgatatttcccagtgtgttcaaagaatagtgtagatcagtgcattgtgttatatagaattgaacttggagttgtgctatttgtaacagtacatgaaataagagaatcagctctgcactactgttcttgcttcatttgtttttataaggaaactatgttttgtcctataaaacttgaaacttatggctcagtatctgatcattttttttgtacatttttaaaaaaaattcttatatctgtgtgtttgtctatatctgtctatggtgtgtgtgtgtgtgtgnnnnnnnnnnnnnnnnnnnnttctgaggttagaaggggttatggaatcccctggagctggagttacaggaggttctgaaactgccagaaatgtatgctgggagttaaaattaggtcctctgcaagagcagcaagacctattaactactgagccatctctctagcctcttttatacatattctgtgaaatcttaaaaagaaaaaaaaaatagtgtacttggaaggccagttgtggtggttttaatctcagtacttttactctctgtataggcagactgagataggtctctgaggttgagaccactgttctacatagcaagttccaagccagccaaggctaatagtgagactctatctcaaaaaacaaatatacacaaaaacaaaaacaaaaaaccaaaacagcagcagcaacaacagaacaatacatttttggctagagagatggtttagtggttaagagcacttttcagatcctagcaccagtgttaggaagctccaacccacatctcacttcttttctaggggctctgatgtcctcttttggcctttataggtacctcctgtacaggtgtcatgtattcacacacacagcacacagttatagataaggaaatgaagataaatcttagaaagctatgtttaacagtttttaaggacacaatgctgagatcaagtttgttgatgattttgacttgtcttatatttgctccttttgtctacctgtttctttgatcaggaaaggtttattacctttgcccattgggctttagtgttttcttctgtttacttgtttgtctttgcttctatcagttctttatatatttagcagctgtattcggtgtcttcaaatgtagagtcattatattgtgacattttcttttatctatttctttaaagtctgtttgatgtttgttcttatttcaattggttactttttctattcatagcaaatgtgattattgggatgtaaatttaccacattagatttttttaaaagttggtgttctcccccactccctctgtgtgtgtgtgtgtgtgtgtgtgtgtgtgtgtgtgtgtgtctttctctccttattgcacttgggattaattataatcttatctcttccatcacactcttgcttattatacatcttttgccttttattttattggcttctctagacttgttattttggttttcaaattcctatactctttttttttaagatttatttatttattatatgtaagtatacactgttactgtcttaagacactccagaagagggtgtcagatctcattacggatggttgtgagccaccatgtggttgctgggaattgaactcaggatcttcggaagagcagtgctcttaaccactgagccatatcgccagcctattcctatactcttaaaaatataaagcttttatagttttaaaaagttgttttgctttggtgttattgctcctgttttattgtgctgctgctgcctaagctgaccttgaatttatggactaaatggatcctcctgtcttagattcttgggtaactgcatctacgtgtgtaccaccttacctggcttatgatttttttttttctgttgtgattctgagagttatgcaaaggaagattagtgttatcacttggcagatcatgagaaataaacatttgtgaaatgaaatgctactgatttgaacacttttttgtatagaagccgtagcatttttcagattcttttgtgccccttcaccttaaatacagattattcaattacagtactaaaattaattgaaaccattgtagatattttgatttttaactttggcagtctttcaaagaaatataatgaaatactaaatccttagttttacttatctcttggttcacaccactttcattccagagcgaattttgtgtcattatgttttcttgaagactctctacccgaatgtacttgtatttttaaatcaagtctgttgtaattaatttttgttgattttattatttcagtgctgggaattggactcagggattaataaatgccagccaagccatagagctgcattcccagtgctaatcatttgggttttgttttgttttgtttgtttgtttgtttttttgtggataggtttttatgtagcccaatttagccttaaaatgctctatgtagcttaggctggccttgaatcctcttgcctctatttctagtattacaagcatgtaccactatactctgtttccttttttaaacattatttttatgtaagatctcattaatttttcctcagcctcctagttgctggaattataggtatgcactactatgcctagccatatttggtgttttaatactgaatgttcatgtaatgctggtattttcttgctgtgttagctggctccaatattaacttgcagatgggagtagcaaacgcttattaagccccttagagcaaagcaaggacattagaatattcacttatgctgtagactgtggttgaaatgatataccagatctgtcagtggatttagtttacttgttcaatatttcattgcatttattggaaagtgaacctattttgtgattgtgtgttaatttttttttatatcccaagaatatgagtttctgtttattccttctaaccccaacttagcagtaggattatgtattgaagtagtagcagtggccaaaacatcaacattcctttcctgccactttataattttaggagccatatgataatagttaggtgacctagtattctaaggtaagaggaaagaagaaaaagttaagaaacacagtgtttaaactttagacagtaaaatcttgaaaaacagagatctggctgggagagctaaccatgctaatacattgtgaaccctctggagggagatggcttgtttaaactctgagctgagaaaatgcctggcataatccactttaaaggtctttcctaacaattaggaacaacttttatatacactttacacagagaccccattcaaatattgtccaagtaattgtgattgaaaatgatcatgatcttgaatcatgtacttcattggatttccatggccctttgtctccttccatctggaacaactctgagaagccttttctttgagtttcctgctctacggagttttgaagattacaagtcattatttctgaaatttgagtttgtccagtatttcctggtagtactttggctgataccacagacatgatggtgtgctctcaaatctttttggtgggcatatgaacattggtgatgttagcactggccatttatttaaaaataatctctcctgtttctagttttcctttttcataattaataagtatgttgtaagccgtcatgggttaatgttgtgaactaccctgtggattctgggaacagaaaacccttgtcttctgcaagaaccatacatgctcttaaatactgagccatctctccagcccctagtattttgtgaggagggacttagtatttgaaaccatgtttctatttttacccactagttttagaatctgttgaaatttttccaaattaattttgattttgctgttatcagatagttttctaattcaattatttcttgtacatttattagttagattctgtaagattttattaggggagtatccttctttactatcataaccacacttctgcagcacatagagtaagactagaatacctgccactgcttatttggtaatcaggttccaaatttgctactagagatcattccacaatagcctttatgcctcctttgaatgtcacctccagtcattatacatagaagagggggcaggaagattgttaagaactagaatactaggaagtttgctgtgaaacagtctctcctagaaatgattgcataaataagactggagtatcaatgggtatgttaacatggaagggagaaaatattgtgggattccacccctaagcaagaactacaggcaactaatgactgctggcagaagaattagcctcttcagggcatgagtgccctttttgttgttcagtgcaaagtggtcagccctgaaatcatatacaatacaataaaaatagactcaacaagttgtatttgtgtgtgtgtgagacatacccacatagcaataataaagaaaagaggctatgaacctaaaagaaagtatgtgtgagagagtagaggtttgaaggggatagcttggaagtggcaggagggaggaaagtgatgtcattttatttcaattaaaaacattttcaaaaatgactcataattttaaagcctccaaaagtttgcagaaacagtaaagaatggtcttatgtcttcattcagattctattaattttatataactattgaattttaaaaataggactatgataaaatgcacctgagtcgataatgccattttacgaccgctatacttttctttttggtataaggtaccatgagatcaaattctaattttcttgctccagccttagaatcagccttttccctaaggactttgtccttgttggaagtgatgtttcaaaggagtgctgagtgggctcatgcttttggagtgtctttattcctagaccctttaaaccagtggttctcaacttcctcatgctgtgaccttttgatacagttcctcaggttgtggtgacccccaaccaaaaaccaaagtgaagaaagattttcaagaagtacacagaaaaagactgttcacatatgtgaacagatttggccattggatgaatgctatgtaggtcattgatgagtttgaactgttttattttagtaggtagtggtatgaaaactcattggattgagatctaaagttaatgggagtaccaaagctaaagcaatgccatatatatttctttcaaataattttcttgtgaagataaaggggaaaaatggaatgatagctgtatgggaagtggtttctagaacctttgttttcctacagtaaaggaacaatatattttaatattaatggaagagagggacaagagagagaatgaacatatggatgaatgtgaatgagaattgaatagagaaaattttaggtaattgtagattaaaagattattatgttctgtatttattaatgctggaaattgatacagcagcaattattccttaactggcttttctccaaatagccacactgagaccttttaatatttcaaagtctttgtctttagctgggcagactctaaagtagctcatttaagttaacccagctacctagctataccttccaggcctgtgatcacgtccgttttctccctggtgtttctcccggtaaaaattcttcacctttcttcccagggttcctttttctctcccaggaagtcccaccttccacttcctgcccagctcatctgggcatcagaattttattaaagccaatcaaaggtgaggaatgacaaacacaatttcatacagtatactgcaacaggtagtaaatgctatatcagttttccagaacagtatgattgagagaccagctaggccataagtaggagggtgtgattatgatgattggctctggaggttaagttatgtggacagtatgggaaggaagaggatgaaatagagtgggaaaagagactctggattgaaggttgttgtatcaaaggaatattggaattgaggcattagagcagtgggtttttaacatactcaatgttatgaccctttaatacagttcctcattttgtgatgactgctcccaaccataagattgttttcattgcaacttcataactgaattttctactgttatgaatcactatgtaaatatctgataagcagtatatctgatatatacccttgtgaaaaggtcttttgatattcctgacccaagagggattgtgacccacaggttgagaaccatgttgtgttaaggtaagctggaaagatgttgcttaagacaaagtatttaaaattgaaattatggaggtgtttcagttattgttgctgttacctcaggaatgagtgtttaattatgataagattagtcttggagtgccagtgcacaaagagccaagacatttatagagactgagattagtgagcccagtgagtaacagtgagtcactggtgatctgatgcaaagctgggttctcaggaaaggagaggaagcatagttatacagttgtcctggggaacagggagaaacaccacatgtagggcccagcatgcaaaaacagttgtagaataaggtaagttgtgccatcaaaggagagcaaggcttcagaaagaaaggtcattttaaaagttcagaagttaggtaaggagtttaaaaattagtaggcaatatggaagaataaccatgataaaatacatgtgcattatattatgtcacacttgtttaaatgttgtcaccaagagtgaaatgtttctgaaaactgttacattaaattttaccttctgggactgtagttttatgatggagcatttaccctagcttgcagtggccctaggttttatccctagcagctacacagaaatataatcaaccctctcacttcctgtgtctcagcagatcattttgtacactctatgaaatatacatatccaatttttgggtctgttgcccatctggtgggtgcctggaaataaaattttgctatagtatgtcttacagaaattattttcaaacttaaaggatcgttcagatttattttgttgctttccccttttgattgaaagaaagattatggtaatttgtgggttccagttaaaggaaaatccaggttcaatatcttttgaatttttttctaacgagttgctaatgtgtacttggttgatgacaggaataaaggaatagtatacagagaagtatcgtcaaaaactgtcccatacacatcttaacatatacctacataaagcattcatttcataggcaggaaaaataataataagttgtctgtcactgaaattgatttcctggttttcagttttgattatgtactacagatagacttcacatatttaaaaataaaaaatgttaacaacaaaagctgagcatggcagcacatatctttagacccaacattagaagaagcagagacaggtagatctctatgaaatcaaggccagcctgctctacatatcaagctcaaggccagccggatctacaaaatgagacccagtctttacaattagaaaagcaacagtaaaaccccgatattctttcctaaaataaacatctttatatttatatatatcatcttttaaaaatatcctgtataatggtgaatacttagaaagttctagattttaacaagtctgatcagctaacttgcttgcttgagcatgttttcagttcccctgggagtcacaaatgcttttgatccattggtccagtgtacagagagttctaatctttttcctctttggtggctcatcatcagagctgctctcagtacctgttgctgctgctggaggagctagggtctgagtctcttcttggtctctctctatgttggtctcttgatgttttgctgcaataatatattttctttttctttttcttttaaagctttcttcagctctgctgttcttgaaggcttgtatagctattttcttttccctttgcattcataagtccaatgtccaaattccaagcatttctgacatcttacatattgcttattggcttcagcttgcctcaagctttgagcagatgcatgggagtcaccatcttggagccttatattgctttctaatagtgggaattttttccctttccaaataaaatatgagctaccaaaagcaaagtagaacagaaaagcatgaattagatgtagaacagagaagtaggaattagattcctcttaatcatacttactaatccataacacttactcatttttttttcagtaggtaagtacacatgtacagggggaaaatataatgcagacatttaaagaggttttgttttttttgtttttttccttcctctcaaagtgtttacttaaaaaaaatagctgtctcttgtgaggctatgccggtgcctggcaaacacagaagtggatgctcacagtcagctattggatggaacacagggcccccaatggaggagctagagaaagtacccaaggagctaaaggggtctgcaaccctataggaggaacaacaatatgaactaaccagtatcccccggagctcgtgtctctagctgtatatgtagcagaagatggcctaatcggccatcattgggaacagaggccccttggtcttgcaaactttatatgcctcagtacaggggaacaccagggccaagaagtgggagtgggtgggtaggggagtgaggggcgggagggtatgggggacttttgggatagcatttgaaatgtaagtgaagaaaatacctaattaaaataatacttctggggctggcgagatggctcagtgggttagagcacccaactgctcttccgaaggtgcagagttcaaatcccagcaaccacatggtggctcacaaccatccgtaacaagatctgaccccctcttctggagtgtctgaagacagctacaatgtacttacatataataaataaacaaacaaacaaacaaataaataaataaatctttaaaaaaaaaaaagagttggaatgattaaaaataatacttctgttctgaaaaaaaaaaaaatcttgaagaccagtaggtgaaggcatttgctgtcaagtctggctatttgagtttagtccttgagacccatgtagaacaaactgactcctgcaaattgtcttcctacttatacacatgtagtatatacatgtactgtgacatgtgccccttccatagacccctccccccaaaaagtatgttaaaacaaacaaagaaaaagagaaaaacaaaattccttgatgtctcgctgtagcctcctgggtaaaggtgagggtatgctttgcttctgaagcttctatggagaagattttgggaactggaaagatgacttagtggtgaagggagataagaatgtttactgcttttccagatgacctaagttcagttgacagcacccatctcaagaggttcaaactaccttaattccacctctaggggatctgccattctcttctaacttctggggacacttggattcaagtgcatcatacctacatgtagccacacttatacatacaatttaaaataatgaaaataaatctttcaaaagaaaggttgcttttgctcttttattaaaatgagacaggcctttgaatctgcatatttacacacaaagaaggagaaaagacaaaagagaacagccactgcctgcagctctgttccttgcagattcctcatgactgttgtgtgggtgacagaaagctgcctgtttcctgtattccttttttcagtgtggggtggtttgtttgttttaatgaaaattaaattaaaaagtaattcagagctggagagatggcccattggttaagaggacatactggtattgtagaggacccaagtttggttccggcacccaaatcaggcaaactcataatcacctgtaactccaggttcaggggatctgacaggcctagggtactgtactcatatgtacacacccacatgaatttaaaataagtatacagaatttaaaacaaaaaatttaaagtgacttttccccagataatatatgcttagtaaatttaaattgctaatgtctgtagatacagatttttatacttttgtgtgcatgtggacttgtttaagcaactcattgcttagatttattgatgtttggttgggaaattgagtgttagtttttaagagtaatgcgatattcaagtatttcagtgacttaaaaaaaagatttttattttattttttttttatgtatgtgtttctgctacttgtgcaggtacacacaaagtccagaaaagggtgttggctctttgggaactggaattataggctattgtgagctgcctaacgtgggtgcagggaactgaagttagaatctttgggagagcaataaaggaattaatgactgagccatctctccagctcccttcagtaactttttatataagacagaaaaagaagggaattttttttttaattaaagacaagctgggcagtggtggtgcatgcctttaatctcagcacttgggaggcagaggcaggagaatttcttctgagtttgaggccagcctggtctacagagtgagttccaggatagctggggctatacagagaaaccatgtctcaaaaaaccaaaacaaataagtaaataaataaataaagacaaggtcttaatggtttagctctggctggcatagaacttattatatggaccaggctggctttgaacttttcagaaatttgccagtattaaatgtgtgaatctccatatccagtagaaaatgaaaagtcttactttctgttgtagtttgggttttattgctgtgaagagacacatggcaactcttttactggaaaacatttaattgggaccagcttacagtttcagaggtttagtccattatcatcatggcaggaagcatgggagtgtgcaggcagacattgtgctggaggagccgactttgtgtcacattgatgtcaaaacaagctcccacagtgacacacttcctccatcaaggccacaccaaatagtgccactccctagggccatgcattaaaacacatgagtctgtggggaccatacctattcagaccatcagtacaactattgattataaacaaaagaaatcaagtaatataataatttgactaattttactcccaaaacttctgaactacattgtgacttttttttgcttgttttttgtttttcgagacagggtttctctgtgtatcctggctgtcctggaacttactctgtagactaggctggcttcgaactcagaaatccacctgcctctgcctcccaagtgctgggattaaaggcgtgtgtcaccaccacccggcacattgtgactattttaattaatatctttccctatttaatgttttagaagaaaaaaatacttaaaatattaatattaattacttgaagttgtattgagcccaataccagccattcgctttttagccaagcagaactgggaaattgttttaatttctgagcttaatcttcacaatttgaggggggggtaatagcatctacttgcacagtctgctaggaaaattaaatggggtgatgttatatttaagtgtctggcagttctgttaccaggcactaggtaaatactagccatcgtgttgctgttaccactgttacagccttagagccttgactgggtcagtaataactcctcacacactttcttaacacgaaaatgtgctagagttgatgacttctattacaactcactgctacacagttaatatgttgtatcactcagcctctcacaagagctgggccagagtcccatacgccacacaaaatttaaggaggtacccaaacttctatagtagttaagcatttttaatgtaatatgaaaactgaatataaatcctacgagaagccaggtatccatgcatacctttcatctcagtactcaggaggcagaggtagggccaagctctggttgtcagcacttaagctgctgagccatcccagcagcaccaatatcttttaattcatgcttattttttgtgttccttggcaaatcttgatatcttcagggaaacaactttaaaaaacaaaatcaaaaacaaaaactaggcaatgaacctcttgttgaagatgggataaagttagtctgttgaatagttggacataaaaatcttctagtacctacaaaacagtacagttacaaatagcttttgttcagcgcttcacgataaatgacagcaggtcagttaacatgatttagagttttcttttctttttccaacaatataaacctagctcaccctcttaaatcatctgcatttaattcaggatatctactcacatctgaagatttggagttagaacctcagaggagagaaaacatgcaatgtttgtcttcctgggtctgagttaccatatttttatgatcatttctagttctatctatttacctggagaaggcacctccttccctttcttccatatatactaagcacaaaattaatgattgttaaatgagtgaaaacttacgtttcatttatttttccttattttgccttgtacacactgccagcatctcagctaatattctctagttagggaattttttcaagctgttgggtatggagagtctctgcaatatactactgtgaattggtatttattcagtaggaacagcatatataatatttaaagacttttgaactatacaaacttgctttttactctttttttttttttaaacaggatggcttaaattccttggtccttgatttggattttcctgctttgaggaaaaataaaaatatagataacttcttaaatagatgtaagtatgtttatttttactattcttgtttggacatataaccgtgctttaaatgaaatgtgtttggttaattttttggtacttaaatcttttaacttgttaacctatgtcctagccactgtcctattgttaagagataccatgaccaagaaaattcttctaaagcatttacctagggacttgattctagtttcagaggtttagttccattatcatggcagggagcatgatgacacacatgatactggagtagcagctgagaactacatcatgatccacaggccacaaggacactgtgcttggcatgggcttttgagacccaaagcccaaccccagagacatacttcctccaacaaggtcactccttctaattcttttaaatagtgccactcctcagtgacttaagcatttgaatatatgagcctatgggggccattttaattcaaactcccacaagctattaacttactaaacttacttttatttatttgccgtttgtttccctttaaaataatattttgtgacttgttgtaatgcctgcctttaatcccagcacttgggagtcagaggtagaggaactgatttcgaggccagtgctagttgtacagagctctagagagctagttctaggatagctagggctacacagagaaaccctgtttcagaaaaaaaaaattgtattttcaaagtaatttttctgaactaatttagaatatttaaagtagatacaatttaagattatgaattgttaagactataactcttgatctaaacgaaaatttaagttaatattgtaactatgactttgcttttatttatccagaagactttagtaagctttgtttcaataattgcatatatttagacttcttaaggaactatggtctggtgccagttagcaataatgtttctcagcattatgttggaataagtaggttctgaaaatatattctcaaaacgagtttggcatagtggctagtgcttgtatgtagcaatttaggaggctatacacagggctctttgcaagaacactgttcttgcagagagcctgaatttagttcttggcacctaagtcaggcaggctcatagcacctgttactaactcctaggcaatctgatgcctcgcactttctgagtcactgtactcacacagacaaacccatcctgataaatacatagtacacaaattaaaaatgttttaaatgtctaataaaggggaaagaaagtgtgagaatgattgatgcatcttctttatccccacacctaagtcctttattttggagttgccaatcctagggtatttctctatttaatagttactatagtaattgatatatttgaaatatgtgattgccaccttttaaagaagtgggttaaggatcattgctaaatttggaatagtaagtgatttcattcctttctctttgtagataatgtctagcaataagacctagagcacagtctttgtatttagtctcctggtcctgggtgacatgcctggctttgtgattgctttctgtcattataaagcacatcaggatttgtcacttgcacacagtgaactgagaagtggaatagctttagtactgctttttggtactcagtgatgtgccaacaaatcctaaagctttagttccttaatgcaaaggtagcatacattttagagttttgtttattttagtgctggggattgaacctaggaccttacattgttaagcaagcagtctgtcactgagttacaccccatccccacattttaaagttttaaaatagaatcctttaaagactaacagaatcagctgaaaattagttctaatatttagaaacaaaaaaatgcttacaaatatagtgactccttttgaaagttccttatctatgatattgataaaagtatggtaatctttttattgtagatgagaaaattgtgaaaaaaatcagaggtttacagatgaaagcggaagactatgatgttgtaaaagttattggaagaggtgcttttggtgaagttcagttggtaagaaaggatttgtttggtttttactatttttttttaaacatcatagcagctgaatagttctaaaatccattctcagccattgaggaattggttttatgtctttgatcaagtcattccatctctgagagcctcagtagtttctatctttaaaagggtgcagcctgtcactaacactatttattccaactctaaaatatagtgatttcgaatgccagtttggttttgcatgtgatctgcttagaagttaacactatgctatattatactataattaattataattatactataattataatataacactgtggcataaaactatatgagagctatattttcatatactggtctgactgaagctggtcttgtcggtgaatatctttaatccaagcattcaggaggctgaggcaggccaatctctgatttcaagaccagcctggcatacagttctaggccagtcagaactatgaagtgaggccctgttttaaaaacaacaaaagtggtcatattgaaagcattctgtttaacaagctgttacatacatatgtgtgtgtgtgtgtatgtatgtaacgcataacatatcgtatacacacatgtaacacacatacatgtcatatatgtacacatatatctaactcatctgtgtatgtgacaaacataacacccatcacaatgaagaaattctttatttttcaggtgaaagtacaactattgcaacttttaacagtaaattattttttggggggttgtttgtttgtttttttcaaggcagggtttctctgtatagccctggctgtcctggaactcactttgtagaccaggctggcctcgaacacagaaatccgcccgcctctacctcccaagtgctgggattaaaggcgtgtgcccagcagtaaatattatatttatattaaatgaagcattataatagttttcctggttttagtgcctgagcatgaggctgccagtatttgtggagtccagttttgtcttttgaacctaacatcctcttgatgactgtaagtttaaattcttctccaggttctgacttgaagagtagagacactgattcctattttgtgagagtcactgtggaggatgatgcttaagttcattaattagaaaagtaatagataacaagttcattaataagtaatactagttagagtactccctatgggttgttttgttatttttattgcttatttgatatatagagccaaatcacatattttacacaaatacattgttttctgcatgcttaagattatcgcagttataaaagagatactagaatttgggattggattttgaacagatggatgtcagatcttgacctattcttgtttttcttttagtttttttggttttggtttttgttgttgttgttgttttgttttgtttttgtttttcgagacagggtttctctgtgtagctcttgctgtcctggaattcactctgtagaccaggctggcctcgaatttagaaatccgcctgcctctgcctcccaagtgctgggattaaaggcgtgcaccaccacacccggcttgtttgtttttttaagacaggctcttctacattctaggctggctttgaattcagtgtgcagttgaggatggactttgaatttccgatcctcttgcttccacttcacaggtgctggattacagacatgtatcctcatgctctattttacatggtgttcagacctagcccaaggcttcacatatgctaggcaagcacacttaatcatctgagaaacaacccagtcaacctggtactgctttgttttgttctgagacagggtctcactatgtagtccaggctaacctacaactttctgacatctgcctgcctatgactcctgagtactgggattagtcatgtaccaccatgccttgtcccaacttcccatgtttgaatgtcagagctgttactctttcttgctattgtggtcattattataatgcagtatgtcaaaggaatagaaggaaaatataaaggtataaaatattatttttgtaattgctgttagccaaaatcaggtatttttaaaaatgaaaaaaatactatattaatctggtgtctgaccctagatcttatgtcttaatttgtttggctttgctttagcctctgttattttagacagagactctttaaaaggaataagattttaaagaaaacattcacatgtttctttcatctgtacagccttttgaagttgatttgcatgtagtaaattagtatggtggatatacagggaaaatgttccaatttaacacatctttatagtgtatttgttttaattttagacattagtaaaaggaagtttcttgatagcacaatttcttctttctgtgtgaaatactttatctggttaagttgaaagtaggttaggttaccacagaggataatgttaacaaatttccacaaataagttttcattctaagagtaactttgatatgtcactgaaatgccatagcatataagaaggttctggagtcaacaacagtatggagctggagagatggctcagcagttcacttgctgctgttccagaggacactggctcaacttctagcataataatggggtctgtaccttcagttccagggatccaatgccctcttctaccctcaacacaagcactgcacacacatggtatacacacacacacacacacacacacacacacacacacacacacacacacacacaatcagcaatacaagagagggagctcagtggttaagagcattggttgctcttaaccagtggacacaggtttgattcctcacactgtctgtaactctagtggccaggcatctgacaccctcttctggactcagggcactgcactcatgtggtgcacagacatatatgcaagcaaaacacccatatccataaaaatttttaaattatagttaaaaaagaataaataataggaaaaaggagtagcttcccctctagggcctatgacctcagtagtaaaatgttaatagacatttttgtgtggagtatctaatactgaggaagaagaataagtgttgacaaccattgtttctagctacaggatattggtttctgtcattcaggttttagttctctcaggttggagtagtattagtagcaatgtaaccttagaacatttgtgttaatactcgattgggttgaatatttgtgtcccttagtgtggttctgactgagtagtgggaccattgttaactttcttgtcaggtgtctaagtgacctttgcttttaaataatcaggtcttactgatttttagatatgcataagtacttacataggaccacattggcaatatcagatttcatgaaaaacaacagaaatttcttttcatatcagtttttggaaggtttgggagccagcttattggtatcttacatattttgatcattagaaacatttgagactgttgcaaaagtgtcagttaaaaatcttccctgaagccgggcatggtggctcacgcctttaatcccagcacttgggaggcagaggcaggcgggtttctgagttcgaggccagcctggtctacagagtgagttccaggacagccagggccacacagagaaaccctgtctcaaaaaacaaaaacaaaaacaaaacaaaaaaacaaaaagctttcctgacttgcaagatggcacagtgggtaaggctggcaatctaaatttaaatctttgaacttgcataaaggtggaagcagagaggtgactccataaagttgccctcttatctccaaagtatgtgtgccctggcgcccccccccaagagtaataataattaaaaacgatagtgattacaggaatggctcagtggttaaaagagcacttgcctctcttcttcccaagctgctcaagccacacagacactcagagtcataattaatgttttccttcatcccttgtgtttaagtttttagacaatgctatagtttgtgtttttacacttagtgtctccttttctcagtattcattgctttactttcatccaagctatctcatatatgaacctctgctttctattcctcttctgcttggtgtttcatcaaagtagtgttgatctcaagttgtgaaatactaatggagagaatatcaagaccgtgtgtattaaatattctgtgtatgctcacctggactgatgtcactatttggagacatttcctcatatttttatatctttatattcttaggtaccacatctattcccgatcctggtgtaggaacattgagtcaactttaggggctttgatatcatatgagttggttttcattatttctgcctctacctatgttgagttaatgaaagacaattctagatgtcatgtaactgtgaatccctttctgcttagtttttaaaattagtatgatacctttatcctggcattctggcacctcttgaaatgtcagcattcatggggctggagagatggcctagcaggtaaagttgaggatgccagagtgcttgccaccactcttgctggttcataacttcatctccagctctagtggatctgatgctctcttctggcctctgcaggcactgcagtcatgtccactcctacacacacacacacacacacacacacacacacacacacacacacacgattcttagctgtccattctcactttgtgctttttttccctatgtgccttttactcctagttttttttttttttttaaaaactatgcctctcagtgctcgttttaaaggaaaatttcagaaattaaaagtttctcttgttttaacattctgtctgagtgaaatttcttctccatatcttaattattgttattttatttgtaatattacatcttaccttgtagtttatgtgttgatattttgatttctttacactatatattttttttaaacaagaactgtatctttcaaagtatttgaccctcttaccagtaattgataatcttcatccaaaagattcatccataccccaggatactgtcttcttcaataaagaacatagcttaaacgagtatctggagaagcagagagaaaagagcagtctttcccatatagccactgtcagttcattcctgcactgcatgtatgcatatgcatatgtggttctctaatactgtacacgtgaactcagttgttgttttttaatgtgaagctggatctttaccctttataaggttctttctgagctgtaaaaattactccctccttctgatgttttcatagtccttgtatctgctattcagtcttggctgccataacagaaagcatgaggacattgtattacttgcatctttggtggaggcttcattaacatcagacattactccaggttagtctaatatacaaattgaattttcttataaaaatataattttattagtaaaaaataaatttgaaagcctcaaatgacatgtcttagaaagaatgattataaagttatcaacagagttccaagaatatcctaagcatgtttgtaagcttcatttagaaatatgacatctgtttaagtcagtctgtcagtctgtctgtctgtctgtcttacaaagaagtacattttactgtagaaagtatgtggtgtggagaaaagagaagttgcttaaattccatcagctagggtataaccatgattaatgttttgtatcttcccccctttttaaggggagggtgtttttttcctcctgcacacgtattactcaattggatgatggtttgtagtcagtgtatttttaaatttaaaaacaaggaatttgacaatctttttttttttttttttataaccaatagaactgataagagaagtgttttgtttttggtcctctaagtacgaagactagtaacagggacacatgcataacttcatattagaatgaaccttattctgtttgtggtggagttaggtaatttttattgactgtattctgtatgctaaatttatagtcattagttcttattttgtctttgcgttgtaatttagaggaattaagtaaatttgtcacctagttcataaatatctctgcttttgcccaggtttgtttacatctgaatccatgtttttaaacattgctgttcagtgtgataattaatagctactgtgtctgactgtttgttcatgtatttgtccatctatattgaatagaggagaaggagctggagaataaaggggagtctacagagatgctgagggagcttatgatagaataactcagagacatcctcagaggaagatgagtggaaatcagctttcctaaagtagcagcactttattaatactactttgtcacatcactgctaatgaattttaaaggtatggtgtagacatttggcatgaataagtctaatgtctgtgagttatatcagagatgagaagtagtgattcctaccttgtgctgtgagccagtaattgtcctagcccagcgtttaaatgaaattcagccttatagccaaaatattcttaatgtgttcaaagtcttatagatactgcatagaaagagtagcagtctgttgaattgactggttcatcattgtgccccccactgggcagttccacagtgaaagcatgtttcccttgaaagcagcttaggaagcaggctgcaaacagcacatctgtgagattgtctagagcacagggaactatagactggagagtaactgcaccaccagtgaagacagtaaacattttctcattcagaagtcctcttaggacttagggctacagtgtatactttttatttgactgtcttatttccaatagttaatagataacttttagcctcaggtcttagctccactatacagcaaaattatcagagttttgtatgtcatggtctaagtataaataatgaaaataataacagaaattaattgactcttaatgctctgtggatatttttttctaatgaagttagagagcatacaaaattcaatttgtttttagagtaaattaaggcttgaaggatggtgtaaatatacatagggagtgtgttaccaacttctaaaaatttgttcatagctttttgatgattatttactttgagttaatctggttattgaacacaagtcaattagaaagctagtatgcttgctgtggtatagttttctacctttacaattgtcatcctttaatccttgacttctgctctgtgttctcatatttttttctggtgcataaatacatttttactgttatattaacttcatgtcactatggagatctagtagggattgattgctgttattgcctagtaacaactcagaagaggaatacaagctacagctcttgttaccacatagttacctcttggacttaccattttcattgtaatgttacaccatttcaaaatacttcagatttcaaaacattttaaaaggagaaatgatgtgagaatgtttactgacacagagggttaacttttccatcagaaaatagagattcatagtttttctttctctaagtctgttagtttttgattcatgaattttcaagttcatttattaaaggtgcaaacatttagaattgtgtgcccctctgttctctcccccttaagtatgggacttgttatgtgtgaatttcgggctggcctggaaccccccaaaaaatcagctgttctgcctcttaggtctttcattcagataaagactgtctgctcgaagtttgttttattatatacatttattcctattgtaacattttatccttactgttttccatggcaaatatgtttgcttttcctttaatcttcaacctgtctggtttatatctaaaccatgtaagtttatgtcttgcttgttagttgtttgataattcattaatgggtatatttactctattatattcacatatatcttagcttaaaattatcttggatggccctagtttgatcacattcatttattcaaatttatttatgctcagattcactaaatttttcacacacaccctcaccccctgattcaagacagggcttctctagagagtgtagccctggttgtcctggaacccactctgtagaccaggctggcctcaaactcacagatctgcctgctctgcctcctgaatgcggggattaaagggatgtaccaccgctatctcactttttaatcactgttcttgtttagcccttctaaagttttcatatgttactatattttttttagttatagaatttctaattgatttctattatttccattttatttaaacacatttctaagagctattttcacttatgtcttttatacttatttgtaagaaaaatttaaagctagacctaacattttcttttgacttcttttttcttatttataactcatgttttccttttatctctttagtaagttttaaattatttgctagatcttgtagctatggagtagagagtttgagcttattaatctctttgaagaatgttagttttcattctgatagtctgttcagtgacttactggttggccatccttgatttgtggaggctcggttttatactttgtcagaataggtgtatggaaagagcaaggtattcctatcgagtcctttcaccttgatgtgactcagcgtctagctaaactgctcccttttgatgtttagatttactgttaggttttgttaggtaccagtggagtggggcttacttagatcagtgatttgtgaccatttcataggggtcacacatcaagatattctgcatttcaaatatttacattaacagtagcaaaattatagttataaaatagcaaatttcctggacgtgcagctgatacatattagaggaggaactatgttctagagcagtggtcctcaaccttcctaatgctgtgatgtgaccctttaatagttcttcaggttgtgatgatactcaaccgtaaaattattttgtcattgatcttgtcactgggggattaatagaggtcaaaataggcatgattttttttttttttcttgagtttgcggtaccctctggggaaccagcaataagtaacaaacatccaaaaaattacaggttgaaggaagaaagcaaatgaagttgaagttgtaaggaaatgatgagattctttatggttttaagaaagtatttcttacttggccccagcaaagttcttaatttgattgggtagacagagggagcttctttggggagtttcacatttcagtgagtggaaaagaagccatgtccttggatgagaagtggtcagggactgataggtttttctaatgaaaatatgtaaagaggaaaggttcattcttatattaaagggactaaaagaagataattgtgcttaaagtatgaacaagaacaaaaggacaaggtttaaattgggaaggtggctttgggctagtcaggactctaggcattgtggttaagaacttcatcttttcttagcttcttcctccaaccctgagaccaaatgctgctgacctttccagagagagagagagagagagagagagagagagagagagagagagagagagagagagagagaacctcaggtgggctgggatattgggctggcatgaaatctggctatgtttgaggtgggtgatgctaacttcaagtttagagatgtagaagtagtatacactatggatgcagagtgcatttcagtctcagcttgctacctttatagtccccaggcagattgaattctctgtgccttattatatttgccattctgacaggtagataagatacctcactgggactaaagcaaagattaaggtaaaatatccaaacacagtagtgtgtctggcacatactatgtaatatgcacaaatcttcattggattaaattctggtgctgacagataggacatacgttgttctttaaaagatataagatcagtaagtgaaatggagcaagaacaaggaagagtgaatgagttagggacatgctggcaggagagggagatagtggcttgatcagagtaggtggtcatgagaaggcagtatttgaactgggatctgaaggagtcaggaactgaactcagggaaaagagctttccacagaggaacagcacatgcaaaagagacaagctgaggaccagaattggttggtttgtatggttcattagactgagtggatatagaagagtacaaccagttgagattttgctagcaagtggagtaaaagatgttggacctggttggcagcattgggaatagctagatatggctggattagaaacaagttaaaggtatgtttctctgacaaaggaattcttaaccttgaacagcttgagtgatggaacagccatttaccaactaactgtaggaaatagatacacattcaagaataaagtttggatgtttcagttttgtatacgttaccagttgttatttattattatacagtatgtgttagctgttataacttagactctatatttcttctttgtgatactttggtatattctgggaaataaatatggttgtaagagctgtagagatggcgcagctcttaagagctctaactgttcttccagaggtcctgagttcaattcccagcaaccacatggtggctcacaaccatctgtaaagggatctgatgccctcttctggtgtgtctgaagagagtgacagtgtagttacatacattaaataaataaataaataaataaataaataaatctttttaaaaaatagatcctattcttacttaagcacaataggaattgatcaagtaactatattgttagttgtgtgtgtgtgtgttttttttcttttctatcttttaaacagatacttaggaacaaaggagaatgaattaattaaatcaggttatctcttacaaactaacctagtagattattaatgttcatagagtaagcgacatgcaccccacacatacaacacatataacactgatgtttcagacaaaaagagatgttttcccccgtagtaaacatttcttgaaaattgcctgctaaatatagtatcttattgttttaaagcatggttagcttaaagagtctgagggaaaatggtcattaccaaggcttttagaatgcagtttctcatttgctgtggacatgaccataaagaaaaattcccatgagggttttcatatgctacttgactagcagttaacctgttgggaacatgtgggggggggggagaatctgaggggatttatttagctgaaatgtgatagttgcttatttgactttaattaaaaggtatatttcctgaaatttgggcccttacatatgttctccctggtaagtgtcatacttctgctctggaggctcacctggaaacagggtattacatgcatctacttggctaagggtcagtttgttttgcagctagttgttaacagcattgcagcaccatcattctccttatgcaattaaagtattcatttttgtttgtttttttataaatcctcaggttcgtcataaggcatcacagaaggtttatgcaatgaagcttcttagtaaatttgaaatgataaaaagatcagattctgcttttttctgggaagaaagagatattatggcctttgccaacagtccctgggtagttcaggtaagcataataactttttgtgttaaggtgcctattcagaagactgttttgtgtgctttgttcacatagtaaaaagtgtaattattttttactagacctgattcagtatgcttgtttagtgtttcttggtggaatagctatatagacatggcatataaaaactattacttgaaactctttcttaatcattttatatatagattttacatgatcagccactatgccactctgaattcatcctgtcattagattgatttgtacatactgaggttagttagacctcatgtaacattctcagcctgtcttaaatgggagaaaagttttccatagtaagcatcttgaaaattctacagtcctttatatattttctatagtatatattgttagtgtttcctaattctgtttcataatattgtttctttttctattatatataccaccagctttgcttttttacatggtatttaactccaatatctaatgtttttgatgtttttgagcaaggaagatgagtaagattaaccatgtaccagtgtgtgctctaaagtgcttaaatgagctggagtttcataccttgcttgaaagagtcagtgtggaaatttttttttttttttaaggtcacatagatggctgtgccatttaaaaagtactgcttttaaaaagtgatgttgagctgggcagtggtggtgcacacctttaatcccagcactcgggaggcagaggcaggcgtatttctgagtttgaggccagcctggtctacagagtgagtttcaggacagccagggcgatacagagaaaccctgtctcaaaaaaccaaaccaaaacaaaccaaaacaaaacaaaacaaaaaactgtgatgttgagggggactgtagagatgacaaatcagttaagagtcagtctgctttttaaggggacccatatttgaccaacccctacatagcagctcctctgacattctgtaactccagttccaggagatccaacacccttttttggactccacagacactgggcacttacatacatgtagacaaaacacgtacgtaaagttaaaaatgagattaagccttaaatccctttttgcttttgtttggctaatcgtagcgattgtttagaaactctgatgtgtacagttcacagtgctgtattttgtgtatatgtgtgtaattatgggccatgataatttgcttgaataaagagtgatagtgatgctgctgtggtggagatagatagctgtaatcccagcgcttgggggactgcacaggagattctttctaagtttgagttctacccgatctacataaggaagtttgtttcaaaaaggaggaaaaagaagatagcactgacgtgtcccacttttagctttaaatctcattcacttttttgtaagttaaccattccatatattgttatcttttgatctttgattctgctgaataaattttctactgagaaagaatggctctcttgataatttaaatagtgtctggttactgccatttctacttgcttgtttccagggaggggctgaagggcctgtgttgtttggtgggctatagagataccttttcttgggtgttgtggttgtggttgtgggtgtctttctggggcaacgtactgtagcctgacagtgctgcttgctgcttatcatgaataagaggataacgaatagagaagaggatttagttcttcaagtgtggctactgattactcattttttttttcactgaaatgggacttacttcttctgtcttttgaattggcatctgttagatgtttctaagctgctcctacctccagctctcttctgtgtaaggtatgagcaatactttgtttagttttcagagaaatactatctcctttgttccaattatagcttttaaaattttttacttagtttcctacattgtgtttcctgtgagggaaacattcatatatgcacattttattgtatgtctggaaaagtaaccatgtaaattgttctgctattttcccattaaacaggcttgatccagaagtaaaggatttcataaattttagctctattttcatgtaaagtagtctgttttttcactagtaataatagttttgggagtttcattttgtaaatggctttgtttttagtatgattttgttcttcctccttttccagctcttctgtgcctttcaagatgacaggtacctgtacatggtgatggagtacatgccaggcggagacctcgtcaaccttatgagtaattatgatgtacctgaaaagtgggccaagttttacactgctgaagtagtgcttgcactggatgcaatacactccatgggcttaatacacagagatgtgaagcctgataacatgctattggataaacatggacatctaaagttagcagattttggcacatgtatgaaaatggatgaagtaagtaagccaacaaaaatgctgttctgtaaaagtttatccatatttactgtgtttgtgtatatgagagagcgagagagcgtgtgcatacagtgctgtacatgtggaggtcagaagacagctctgtggggtcagttttcttcagctgctacatatgggttctagagatatgctcaggtcaccaggctgtgccaaaagtacatttacctgctgagccttctggttagtcctaggttttttggtgtgtgtaacaaatacaaatcaggactctgcaattttgagtaaaaatgaattttgctttgacaatggcataagtgtcaagacaaaaccgtttgaatacatcctttactattcattcatctaggtgtaaaatacttctattagtggcttgatgaatagcatcagtgcttagttcatttatcttcttgacagccatctgttaccaatcaaaactagttagtaatggtctaagtgtatagaattgggctacaaaatttaagttcaagttcaggagtacttttaccaacattattattttcgtggctttttcctctttttgacaaaggaggtgatacaaaatgaagaaagaagtcagtcactttatacctaactcttctgtatcagagttggttcaataacagtatcttcagacataaccatgctactgatttgttttgattatgtaattttacattttgtcctttcttgtctgtactgttaattcctgatgaggcattgttgtctagaagatagctcgtaaattgtaagtaatctgtgcctctaggagactaaatttcacctttggtatagttttcataaccttacagaatcaccaccaccaactataacaacaacaacaacaacaacaacaacaacaacaacgcatgcacaaaaacatttggaatgtccacaggcatgattttttttttaattacatgggactcttaattttctagtaattgttagatgaataatgctgttgcaagtttttctgtcactatttacctttcctttataattgtctctgtctacattagagaccgactagagttcactggccaaatctaacctccgccttggtggtgtacatctaaaaaaatgatcttcataagtttcagcatttaaagaagaagataaattgatagaaactctgtaccccttcaggttgttacagtctggcagcaatatagacatcctttgatccttgaatatagacattcagtgatctttactttctcttacattatgtcagaggccacaagatggtattggattttctggagatggttgtgagccatccatgtatgtgcctctgagagatctgtcggtgctctttaactgctgagccatctcactagccccatgccatcagttttaatatctgatgtttcttcttatatttatttctgaaaaattctattttcctcaaaagtgtacgtttaaaaaatgaaaatgggccaggcgtggtagcacacgcctttaatcccagcactcaggaggcagaggcagaggcaggtggatttctgagttcgaggccagcctggtctacaaagtgagttccaggacagccagagctatacagagaaaccctatctcgaaaaaccaaaaaaaaaaaaaaaaaaaaaaaaaagaagaagaagaaagaaaaagaaaatggtaatacttgctgtattttgtattttcagcttcgtccagtatattatatagcttcagccagtgggatgatcagtgtaggtaaaggcacttgccaccaagtcccttcttgggactcacatggagagaggacaaaaccaacgcttgcaagttatgcttgtgtgcccctcatcaatgaatcaatcaatcaataatagagataaaaaaacctttgtacttagaataaaaataatcagtacccaagggaataataactaagggaatccaggtaggcaggtttgtgcagttaggggcagatgaaagtgtgagttccatttaaatttttgttttcaacatttgtaagaggcattttgaattgtttataagacaaaacacaagacttctgattgatccatttttaagttttcagtaaactctcttggtctatattttgtcaatgacaaatcatcaaatttatttagaaaacattgaacttattacattttaagtgattttttttggttgtatgtgtggcatattcatgtgttgcaggtatacttgcctatgaatgcatgagcaaaagctggcagtggatgttaaatatcttctatctccaccatttcattttatttagattgtatgtgcttgaatatgtacgtgcgtgcgtgcgtgcgtgcgtgcgtgcgtgtgtgcgtgtgtgtgtgtgtgtgtgtgtatacctgtgcacctccaggaggaacccagtggaggaggtcagatgtcttctatcacttgctaccttattaacttgagacagagtctctcactgagccacaactagtcatttagattggctgaccagtgattcccccaggacctgcctcttccttgccacatccccctgtgctgagattacaagcatatacaaccatatctggctttttatttgagtgtttaggatttgaactcaggttcaaatcatatgctatcattatgcttgtacttctagttactgagccatctccctagccatctgtcttttatttttaaagcaaagtctctcactatacctggagctcacttgtttagcaagactgactggccagtaaatctctgggctttgcctgtcccaaacactgcgttttcgcccttcagcctggctttttaaattggttgctaggaactgaaattcaggttctcactggtgcacaccaactacttttacccatctctccagtccccagtgaaagtaattctgagtaaactttggaaatgaatgcctagtcattgtgttttccagcacaaacgcatatgaagcctcttaaaatacgactcttggtgccgtcatgtgacagtacctcatagctctaaagttgctttgatttgtcatataattctttcataatgtgttacttaactttatgaagtttccatacattggctccatatcccttagtttattgactttcattttaatactacagaatattaaaaacttgcctttttcccctttgcccctactccaagaagctctgatttctttgattagaaatggtacttagtagtatctgtatgattgctagatatgctcattgctcctaatgtatcatgattttcaggctcagtcaatggatagagctaggaggcatggactataacacccagtattcagccacatgccctgatgcttacatttgagtctctgtttctgtagatgatatgtcaagtgctactacttatcactgatatatctggttgaagtctaacaccatagggtccagtctagtctttctcttctcttcttgtaatttctttcaaaggctaaaaaaaaccccaagcaacaccctctggtttgtattagctaattatagctttttttaaaaaaagcttgtttaaccctagtgtatgtttaaaattgtttcataattgttgtcctcactactgtgataaatagattgctttttgatttgaagatgtcctgataaaatagctagtttttccaaagctccttggattattttttttcttgcctttcatcgtggttatattactcatgaaaaaaaaaagtccacctttcacttttttatatgtggagcttcctctggttttatgaggatttttttctaccttttttgtctcttctggcttttaacagaactgtaaagtacagggtagtcgttgatggatggtaattgtaggagctgagcactcccttccttgtagtgcagtatttgtctagacttctgaaaaccctgggttcagtttcaacactgtaaaaaaagaataaagtgtgggtcctgtcttttaatgtcactatcttattcttcttgttgtgtaataatccgcagaactatttttctgttaccatctcatattcaaattatgatgacttctcttctcaatttgctggtatatttggagaaatataccaaattaaggatacataaaatactatttttgaaattagtttctcagtttaacatgctttctttatagcatttaaacatttgtacaaatcatggccacaaaacacattgaagtttgttttcctccaaggaggctttttgttgttggttgtggaagtagtgtgtagtaatggggaatgaaccttgggctttgtacactaggcagactcgcttagcattgatctatgtccctagccctaatgtctacctagcatgttagtatttctatagctttcttgtgagaaatgtggtgatgcaccattagcagagagaggaagtgaagggcatttggattaatatagacaatgtttacaagttagacagaacttggtagctttaccttgctagagcgatttcacttagcagagagcactgtgatgctttgtgcacgtgtactgcattgcatgctcgctctcttactctcctcccttcctctctcaggagggacgattcttatctttgccaaaagagactagaactagggagatggctcagctgtcaagcatgaggatctgagttcagatctcctagtaactggtcactagctcagccagttactgatctcctagtaactggtcactagctcagccagttactgatctcctagtaactggtcactagctcagccagttactgagctcacggttcattgagagactgtctcggataataaggaggagagtgatagaggaaggcagccatcattgacctatggcttacacacacacatgaacatgtacatgttatacatatacatacacactctctaagaaggtactcacagaaagtatcttactacccaagaaaacagaacgcaggtaaaggtgttgaatcattttgccaaatatgttgataatacagctacgtactagaaatatgtaaacctaagatgcaccaaacctttttggtcttttagtttaaatatttacacttgatcttagctaaaaggctgagaagcgattagtttaaatatttaatacattttctcagtctgctcatgataaactgtgaaccagttcttaataccatatctaagctgaattgtgtattgccattgtagacacttttgtttctttccaaaacagcaagctgctttcctcctaatgattctttccctttccccatgttacatcattaagatctcattttgtagccccttactttagaacgtatgaaataaacaacaaaagttgtcagtttctgtaggtttgggagcctactgccttttccattttccatggatgaaaactcatacctggcctccctgatgcagatatttctatgcattcagtggtgtatataatccctgagtcctgaagtaacgtcagcagttgtgttctattgtaagtgataggtggcactgtctgataataagtcagttgtcactgtgtgttcaccctcagtgtttggctttgtttttcactctgttgtttacccagacaggcatggtgcattgcgacacagcagttggaactcccgactacatatcgcccgaggttctgaaatcacaaggaggtgatggttactatgggcgagaatgtgattggtggtctgtaggtgttttcctttttgagatgttagtaggtaagttaatatttgaacttgttttgttttcaaaacccttttcatagcactttatagttcagtcaagaattggagaatgtggactggagagatagctcagcacttaagagcacagtctgctcttccagaggtcctaagttcaaaacccagcaaccacttggtggctcacagccatctgtaatgagatccgatgccctcttcttgtgtgtctgaagacagctacagtgtacttatatataataaatgagtaaatctttaaaagaaaaaaaaattggggaatttaaagaaattgccatgtcaagggagggatttctgaatccctgaactagaatctgatgtaaactggtgacatggcttaagacactgattctcatcctgtgggtcttctccttttggtgggtaggaggcaaatgaccctttcacaggggttgcctaagaccattggaaaacacaagatatttacattatgattcataacagtggcaaaattatagttatgaagcagcgacaacagtaattttatgtttgggggtcaccacaacacgaggaacattgggaaggttgagaaccattggtgtaaggggtaaaggcatgtgtggagcctgatgatctgatctccaggactccgttgtgtgtagaacacatgcacacgttagtatataaataaatgacgtagaacaacatcaaaagaaatagtatactgtatgttggtaggaagtgtttctctagtagatccttttcttatttttcataagtattttcatataacccatactgccctcaaactcgaaatcccctgcctcagcgtcttgttagctaggattgcattgatatgtgtcactactcaccagtgttcttttaaaattaaggcagtattagagcaagaacaaattcacagattttgtagcccttcactaatcttttaatctgctctcctggaactgagctggaattataggcagatgtgagccccatggccggggtgctgggagacagctctggaagagtcagccacaaataaatacccttaactgcctagcccttgctccagacccagtagtttatttattttgtctgcatgtgtcacaaatgtctatgctaggaactgaattttggccctttgtaagaggactgcatgcccttaactactaagccatgtcgatggaccctacgatttcttaataatatttatagtagatattttaaatggttgagtaaatatttaagtaaattttagtatttgttccagtagttagatagaaataaaactgttctttggttcatgtaatcttattatattgttgatttgcaaactgtattttacttattgtttgcatatgttttaggttttttgtttgttaagaaacagggtctctcttgattggcatgaactttaacacataaacaaatacatattcctcatccccctctttttttttttcttcttggtttttcttcttcttttgaaacagagtcttattatgtagaccagggtggcctggaatttatacaagatctacctgcctctggctctggagtcctgggattaaaggtgtttaccatcacagtgagatgaatcacatagttactttcaaatagattgttaagggtctcactatgtagctctggctgtcctggaactcactatgtagaccaggctggcctctaacagaaatctgtctgcctctgcttcctaagtgccaggactaaaggtgtgggctactacacctgaccccaagatataatattacatactattagagaaaagtcagagacaaatttaattttcaagggtagaagatcattggtgtggttacattttaaattatttgcacatgtttgttcattttagctgttattcttggtatataggtcatttgatggatttaaacttaatatatttaaatgttacatgaaaagcatttaacttgaattctttattccattcattgctgtctttctttaaaatttaggggacactccattttacgcagattcacttgtaggaacctacagcaaaattatggatcataaaaattcactgtgttttcctgaagatacagaaatttctaaacatgcgaagaatctcatatgtgccttcttaacagacaggtaaataatacaaagagaaaccctttctcttttaaaattggcagaagtgaaaacatgcttgctttgtatgtttgtgaaatcaacctttctggttatcttagttgcgtttaattctggtttagtccctgattccttgcctgtaggcctagtgttggattatcttacgtcctaagtataacctaatttctacctcagtccttgtatctataaagatgcatatttagtaagtgactacatttgaaagataaaatttatgtcactcacgttgtacccttttatgtaataattcataatactcttgattgtataacttctaagaggacacagtttcagtagataaatagttgatactgtttaaaattaaaaactatttataatctttaaatacatctttaatcccagcactctgaaagcagaggcagttagatctctgagtatgaggccagcctggtctacagagtgagtttcaggacagccacgcctacacagtaagactgtctcaccccacccctcaaaaaaaagaactatgtgtttaatatggaagtactttcttctttctctctaatttgcatttgcgtatgaacaaatctgttctggaaattctatgatcttaaaaaaagccaaatgaatgagcaaaggtgtgaaagctgccctaattttatttttattttttggcttctatagtcatttgtttaaaagaactgtaaattttggtagttatatggttgatgaataacaaatgttgataaaatcaaatataaccaaaatgatgtttgctgaggttagtgagaatttcattaaaagaggggtacaagctgggaattcactagagacatattagatgacttctatttccatctagttttcagggatgctcctggtggttaaagaatgaagttctcaatctttttccttttactcagagtgatgattttaaagattgatttatttaatgtgtatgagcatactatagcatcttcagacacaccaaaagaaggcattggatcccattacagatggttgtgagccaccatgtggttcccgggaattgaactcaggatctgaaagagcagtcagtgctctttatagctgagccatctctccagccccagaatgataattttaatataaatggagagagagcttctagtaataaatatgaatagtttaaacttaatatatgggttcttttttttaattaagatttatttattgattgattgatttattataacacagtgttctgcctgcatacatgcctacgtgtgagaagagggcaccagatctcattatagatggttgtgagtcaccatgtggttactgggaattgaactcaggacctctggaagaggacacagtcctctcaacctctgaaccatctctccagcccatatggattttttttaagtggaggagagagatttttaatggtgcttctatgagagcattctgagtaatgtttttcccaaagttctcatagttctaggtcaaggggtgatgtaatttggcatgtgcagagggagttttttgtacttttgattggcagcagattgctaatgaaagtagagtttgtttcccatatagtttactgtgcactacacatcattatacctctttaatctgtccaaagatcagatacttcaaaagtgacatagcttatttttgagaaatgtttaagctgaaacttttagtaaaaatatttaaagttacaatccttgcttttgtgaaaatattaaaaattaatattcttatttttcacaatataatctttaactgcattatttagggaggtacgacttggaagaaatggggtagaagaaatcaaacagcatcctttctttaagaatgatcaatggaattgggataacataagagagagtaagtcaacctaagtgtttccatttcatcacattttggatcaaattgaattcctcttcagaaatagcagacatgtttgatggagtatgtgataactcagttttaaatctagagatttccttttcctgtggcaaaatttgtaagtaaattgatcctcattgttctagtaaactagtgttccttttaacagcaacatttcccaactctttttgtaataaacattattcatctcttatttggcagttttgttgatctcggcaatagaatatgatcctttaacttgagtacttaagttgataaattaatattatttattgagaccatattgtgatagaacatagttatttactttatgtatatgacgttgactcattttaagagtaagaaatattcctgcttaagaaatgtagaaaactaagatcctctacaatatgtgtatgttactgctatgtgtaagttttcgcctctagaagaatttaatagactttccttgcttgctatattaatccatatttaaagctgttctaatatggtaataaattatttatgaagttttaaatctatgacatgtcaaatagaagatgcgttgctaggtttttgtataaaatatcatactatctcatgaaaattagtttattttggctgtgagtgaaatcatattttttttcctcacagcggcagctccagtggtacctgagctcagcagtgacatagacagcagcaactttgacgacattgaggatgacaaaggcgatgtagagaccttcccgattcctaaagcttttgtgggaaatcagctgccttttataggatttacctactttagagaaaatttgtatgtgatttatttgttaaattttattgttacagcatagcctagctgtcaagttttttcctaacggactccttttaattttatttcatcatttgaagtttgaatgttacattttattcatttacaaatgattgaaaggcactgtcctatattcttttgaagatatgcagtaagaacaaatacttgactttgatggagtttattatctcatgaagaatataagagaatcacagaattataaagaaaggtagaatgtgatttgcctttaaacagattatcacagtggatgttcttctgagggagttttgactggtaagcaaggagaagccactgaaaactgttaaatattggaatcaaatgttataagtgtttgagaaacttcttggtacactcacatatcatgatgagagtgaccagctgtcccaatctctccaggttcaggtgtttcctaggatgagataacaaaaccaggaaaatcttaggcaagtgaagttggattagtcaccttccttaaattataatattctaaacctattttgagttctgaataaaataagggtattggactggagagatgtctcagtgtttaagagccctggctgctcttctgggggacccaggtttgatttccagcacccacatgacagctcaccaccatctgtaattccagttccaggagatccgaagcactcttctggcctccatggacagcaagcatgcatgtggtgcacagactaacatttaggcatcaattaaacagtatgtgttttttttaaaaagtgtcagggataaaggaaacttatccatgtttatagatggtgggaaggacaaaactgaaagagaaattgacagttatatcaaaaagatgacttaggggctaagaagatggcttagtagataggggctttgctgccaagcctgatgactcacatggtgaaaagagaagaccgactcccacagattgtcctctgatgtctacatgtatctcctggtgtttgtgtacatgaacacacacaataacttgagtgtaaaaaaatgtaaagtttcgctgggtggtggcagcgcacgcctttaacccagcactcgggaggcagaggcaggatgaatatctgttactttgaggccagcctggtctacagagcaagttccaggaaagccaggcctacacaaaccctgtctcgggggggaaagattactgagttatttaaattatgataccaaactcatatgttatctttgcaaaaagaagaagagctgttcctttctaaaagaaattatagaatatagtcattatagaagctcaagtgggatgaagaggtctgtgttgtgagtctagtcctaacatagttaagactggtttctttggagaggcagagagcagaattagtgcttcacttagaatgctcatggtctgaaagtagcttgattaatgtgattaaatggattaaagtgtaatgaaaagaatctctctttctgtccttccaggttattaagtgactctccaccttgtagagaaaatgatgcaatacaaacaaggaaaagtgaagtatgtatacattttttactgttttatttactttagtaacatgttcaaatacttacaccactattttgatttttaattatttttgtgtacaagtgttttgcttgtattaatatctgttcatcaagtgcatgcagtgctgtggaggtcagaagggagggttggagcctctggacttgtagtcacagacggttccaccaagttgattttgggaactgaatctagatcatctgtagaccagtgctcttaactactggaccatgtttccagcgccatcataccagtgattttaaaagctcacttgatactccttatgcgaatatgtgcttttagcttcattcattattaggaatgatagatttaaaactagctgtaattccagctagaagacattatgatcttagtgtggtaaaagagtataagcaatggggcacataactaggggagaggttaaaattctgagttcctgtttacgagtgtatataaagaacagtgactcaaagcattaaaataatttgtgactacatacaaagctaaatcataatgtaaatatttcttcacatgtaatgaaaggtagaaaaacctgttaggtaattttggaatggtatacattgtatgtcttttataagtacttttatgtgtcttttatatgagacttttataaaatataacaagcattgaaatgttttctttccttcctttttctgaataggaaagtcaggaggtacgttatcaaatacaccgaaaaggaggaaaaagtcatgttttaatctagtcatagtctgcttcccatttggagtactgcacctacccaagagacttcccatcctttttcctaccaagtacccttttattatttttcttatgagtctgttgtttaaaatatgagttatgtaatatttttgtctttatttatcaaggacatgtaacagtatgttcagagtattacagcaatcaaacaaccaaagtacttaccttgacaagctcattagtctgtattttcttttaaaaaaaaaaaaaatatatatatatatagttttttctcccctccccttccctcctttcagaaagtgtctcaattgtacctggaactcaaagattaagtcagattggatgaccagcaagccccagggatctgcctgtctctgccatattttccaccaaactccccacccccaccccaagcactggagttagagattcacactacatgccttgattttgttgttgttttgttttagttggttggttggttggttggtgttttattttgttttggaaacgacttgctttgtaggcttggctgacctggagcttaccatcgagtccaggttgatttctacctgcctcaacctctaaggctgggcattaccaaaccctgactttatgtgtgtgttacttagttcctcatgcttgtgcagtaagcatcttactggctgagccatctcaatagctcttgacctatacttgtttggggacaatagaggaattgttggttgtttttaagatgaatttaatatttaagacgcatactctttagaactttggctttggtgtcattgttgccttggcctgagagtattcatccttttgaatttcagttattgaagtggatatcacactactaccattgttgttggtgttactattattattgttgttgttgttgttattattattaggactggaactcattatatagagcaggctggccttgaccttccagaaagatcctctttcctttgcctcctgagtgctttaacagcatgtgacaccacatctagaagacactgtcttacgcattttgttcttgttaatgggcaacacttgtaaattcatgcaggtacactcatacatttaaaagataatagtacattgttttaaaaagaggaatattttaaatgatgtattattatttaatagttttttaaaatcagtttaacttgctttaaaatgtacctaattaaaaactaaggaaaaggatttgaaatgtaattagctatcatttactcaagattcatttaatctttcttcatagtagtgtaaggaatcacaaaagagtttattcctgtaaatgtgtttattctgtacgtgtgctgtgaatgggagagcaggaggcgagggagcgttccctctgagtcaaagtcacagtcagcaagtacaaatcctatgttcttagagaggactctagtaagtggggacagcagaagaatatcattgttttcttgaagcttctcatcattgtgactgaaacttagaatttcttattttttgacagattcagaaaaaattatatgcactagaagaacaccttagcagtgaggtgcaagccaaggaggagctggaacagaagtgcaagtatgctgtcaggcagtgcatttttaactgaagtgtaaatacagtcctgaaaatgaaaagcatagattaattatataagcacttccttaattagtagactgctttattataaattagtattattttatttactgttgctttttaaaattctttagatctattaatactcgcctagagaaaacagcaaaggagctagaagaagaggtaaaaaatttctgtgctttattaacatttttgtaggtaaaatcttagatacccacataaatataaggttctcagagtattatgcagttcatattggtaaaacctatctgtgtcatagatgaacaagatggaaattactgtaaggtgacttctcttacctagacttgttttatcagtttgagttaatttagtatgtaggtatttcaagatttaaaaaaaaatttatgatggtatatatgtctgaaaatgccataatgaaacctttactttatatactaacttaaaagttaatttaaaagaaaacttgcttttgtatgatgataaaagtggctgatatgctttaaaaagaagtaattctttttataaaaatgtttgatattagtaacattttaggtccatgggattaagtagtgatggtttgttagtgatagaaagttgcagaaagcttaactgttaatataataaatttgcaaatatggagaacattacaattttaacaaaacagtgatggccttttaggacttttcttttatgtgtttgagattactgatatattttggttgatttctctgcatattttgttttgataatagtatttggtgttatttcagattaccttacggaaaagtgtggaatcaacattaagacagctggaaagagaaaaggcccttcttcagcacaaaaatgcagagtatcagcggaaagctgatcatgaagccgacaagaagcggaacttggaaaatgatggtttgtgatataaattgtttaagaagaaaaatattgaatatatctgttatatcgatgcttgtagctaaaatgctttgttttatagttaacagcttaaaagatcaacttgaagatctgaagaaaaggaaccagagctctcagatatccactgagaaggtcaatcagctccagaaacaagtaggttggtctgtgtggaaagtgctaagttatccacgtctgtcagtgtgtgtgctgcaaagcccttagctcttaaggagatgatgcctagggaaatgctttgagtttcttatttaagcagcttgtaacaagtcaataaattgatgtatttttgttatatctgtgattatctgtttgcttttgaattggatatcagctggatgaagctaatgctttgctgagaacagagtctgatactgcagcacggttaagaaaaacccaggcagaaagttccaaacagattcagcagctggaatctaacaatagagatctacaagataaaaactgcctgcttgagactgccaagttaaaacttgaaaaggaatttatcaatcttcagtcagctttagaatctgaaagaagggaccggacccatggatcagagataattaatgatttacaaggtataaaaaacagtgattgatttgatattgataatgcataattttgaaataactttagataactaatgcattgctgtaacctggggtttttgtttggagagactgttgagctgtttaagagcacatattgctaagaagttcagttcctagcacttccaccaggaggcccataattgcctgtaactccagcttcagggattccaacgccctcttttggcctcctttgacactgtactcacatgcatcagtccaccctctcacacaaacatatagacacataattaaagtaaaaattataaaataaaattagaacattacaagtatttttgtgaacaaaagatgtattttcaaatagtgtcatttagatttaggttatcaattgagttctagctaaattaactttaaagtcctgttctgacaggttataaaactcttgctcacaaatgacaactctaaaatataagatagataatttttaattgaatacattttgagaaagttgttttaaacagtgctttaatttttaggtagaatatctgggttggaagaagatttgaagactggcaaagccttactagcaaaagtagagctggagaagagacagctgcaggagaagctcactgacttagagaaggtaagcatggcatgctgcactttgtgtgtaagaagaaagcagtatgggggctggtgagatggctcagcaggtaggagcactaactgctcttccaaaggttctgagttcaattcccagcagccacatggtggctcacaaccactcataatgagacctggcaccctcttctggtgtgtctgaggacagctacagtgcatttatgtataataataaataaaatcttttatttaaaaaaagaagaagatagcagtgtgattttagatgagagaagtgaccaaaatcagagaagaattaaataggtatttacgaggtagagtatttccatatgtacatggactcttttgtatttggacttgagtatgcaaacaaggactataactgataccatagaggcagtccttggtatgctggactacatgaaggaagggattcagtgttatactggtgatgcttttttagagacccaggagaaattaagactttaagataaatatttattctttgagaattttatacaatgtagaaaaattcaaattttgactggtatatctttaaaattaatgtaatataaaattaaaatatttcttataacagttttttaaaatattgtagagctagggattatttctaattaatattttattttcatttgtttattcattgatgtgaatatttagtgttttctatagtagaaatgtcagagtgcagtgtggcctttaataatatcacagtctaataggtggccatggtgacacaaacttttgatctcagctctcaagagaaggcaggtgcgtctcattcaaggctagctgggggctacctggtgagttcctggcttgacaaaaaagtgataataaagccctaggtaattttattgcactgtatgtaaacaaaatgctagctgtttggacacagtatgcctttcaggtgtagaaatgagcccctgacatgattgatcagagaggtgggctgagaaagaggcacagtctagctggaggatagccacttgaacaaaactgaggatagaaaacagcagtgactggtttgcttgttcagtcagtagtttagactatggagtcttggtcagcaacctagtcctttaaggttcagataatgaatactccagggttgtgggccatgtgctctgtgttgcaaatgcttggacacatgtagaaaatggactgacttctgttaacttataatgtgtttggttagccatgtagcttagtggtagagtgcttgcttagtatgtccaagaccctgagttcaaattcaacatcacagaaaaatacctactatttgggcagtcagacatctggaaggtttgttgttgttgttgttgtttaatgtagctagattaaaagcattactttttgtttgcttaagacagagtctcactatggaggcaaggctggcctcagactttcagatatctgcctgcctttgcctcccaagtgatggccattagctacatttgtaaattttgagaaataatgttttaggaatatctaaagaatatcatcatcctgcagctagagagatgacctggtagttaagagcatttgttcttcttgcagggggactcaggtttgattcccagcagtcacaaggtggcttacaaccacctttaactccagttccagggaatctgtcatcttctctgacttttaccaggcataaatatggtatacatacatatacatgtacagaacaacacacacacacatttaaaataaaataatttttaaaaacggtaaaactagaggcagctagggaaacctgagaggtgacaggacgatgagagcaggaatgcagtgtcaaactcatcagtggatagtgtcaggtgcagattagagaaatagagtaggagaggctgagaaatggtaagaatagcactctggtcagttaactgaaattaaacaggctcaattcagatctcaaaacaacagtgtgaatgggtggtagagtccattggttactatcaaaagaagctcagatgaagaaggaaagaaaatactgaaccttcatagtgacactatttaaaagtaattttaaaaggtttttaaattctgttaatagttttggaaatgtttcataggaaaaaagcaacatggaaatagatatgacatatcaactgaaagttatacagcagagtttagaacaagaagaagctgaacacaagaccacaaaagcacggctagcggataaaaataagatctatgaatccattgaagaagctaaatcagaagccatgaaaggtatgcattgtgaggggtattccaggaacattttccaagagcctagcgttagtctttgattttacaaaatatttatttatattggcaagtattgggagctgaaaggaagaaaattattagagaaattttatatacatcattttttaacctttgatccattacaacagtttctaaataccatatttttaggtttgaaaaacagtaatatttcagtggtattggtgataaaaggtgtgtagtgtgacccactctacctaatgatttttgggagatatgtcctttgatatatatttactataatgtgacattttaccaactgtgttacagattattaatagttaaataagacagggacttacatagtagctagtccagctagactcagaagtagctcattgagtattatagactagcatactaaagatgccaatcagattttgttaaagtcatgtcatactagtagattccaaagttaattttgtatttgaaatcacagaaataatcagtacttgaaaatttttatgtccgagtcttaaaacactggaacagaaatttcacttcttattgaggcataatattatgaatagcttagcaagaaagcttttataaagtctttaagtatactcagcatttagcttttcttattataaccagtttagtttaaagcactaattcaggatgataaaaaaatgaaacaaggcatgaacagtagaatgagacttcagttcagcacgctagaggcaggtacaggtgagtctcagctggggctgcacagtgagatctgtcccagaacaaaacacaaagcaaaacaaaagagaaatgaagcaggaactttattcagaaagtatagtctgaagagattacgctgataaactgtatatttccttgtctatgccctagaagagaattatttatttatagtaagagatgttatttatttatagtaaagtataaatagttttgatgtatgtgctccactcatatagctaccaccaaagcaaactgtagaatatgtctaccgcctcagtaagtttccagtgcttttatattccctgtaccattattacatgattttttaatgaatttttgtttgttttgttttgtttttaagacagggcttcctgtgtagccctggtcgtcctggaaatctctctgtagttcaggctgaccttaaactcagagatctgtctctgcttccccaatgctgggattaaaggcttgtgccactactgcccagtaaatatttttatttatttattaaatgtgaatgcatttccttattgcttattttccagacagacaaaatgaaacagtctaatgtaatatattttattgtttccagtcgttagttggaacattaatacatgatatgtgatgactttctaatattttgcacataagcacacaacacttaaatattatggatgtcattcaagcctgaatctaaaacttgctctttgtactgcatgttatcacctcagtagattaagaacatggcttgaataagcaattattgccagtatgaccttgtctgtggtttaaactttgctgatacgttgttctctgtaaagggataatgatggtgatgttaggttgtgaaatcaagtgcaattgtacatattaaaataattagaaatactgtttatttagtagcatgtagagaaagattcatttatttgtgtacatttttaaagacccttcattaagtattttcagttctatccagggcgatggtttgatggataaatattttgctgtgtatagatgagcctgtgtaaaagccaggcaggcatgacggccaccttatacccagcactcaggagacagagaggggaaatccctggtgcagctcattagctagacaatgcaaattagtaggttccacattcacccagagaccttgcctcattatataaactggagggtaaacaagacaaatatctgacaactttagaccactcaatatacatgtaaaggcatgtacacttaaaaaataaatttaaaaaagccctaaaaaatcatgaatttaatttttacctaatgaaactttttgtaaatgatagttggatgttaaagattaggtgtgagatagcagaggaatcctagatatgaactgaaataccaatcaattaactaaaacctacatttaaaattaaacttacttaggaatacactttgctgatcaccttaagatgaaaaatgcttttaaagagttatttttctgattaataagttaggtttattgcaaaacatttagaaaaatgaagggaagtataactgaaaaaagcaaagactacctacagtcctgctacgtaatctagtagatttactccacttccttaaccatttactcattctcaaaaacaaaacaacaggggcggggatagggaactttcgggagagcgtttgaaatgtatataaggaaaatatctaataagaagagtactcattcaaaaacaaaaacaaaaatagcactggagacatggctcagtttttaagagcactgactgttcttccagaggttctgagttcaatttgcagcaacaacaaggtggctcaaaaccttctatgatattatctgatgccctcttctggtgtgtatgaagagagtgacagtgtactcgcatacattaaataaataaatgaatgaataaataaataaataaataaatattaaaaaaactaaaccacacacacacaaaaaaaaaaacccacaaaacagtgagcactaatgagcacttattgccaattatatatctggcagtatttttctttttttccatattcaggaggttaaatactgttaccatcctagatagaaggaaattgaggacagagaagttaacttacctacttaaataattagtacgtggcagagccaagatttaggctcagaaagtttgacgcctgaatctttctatctccacaaacattattttcaacacctgcataataatatactaatacagaaaggcataaaatctgtctggaatgttttattgaaagattttaatgtcttataaagacacaaagacagaattaacttttttccattagaatagatgtaatatcacaagtagtatgatacattttatactctgcaaatgtataaagtttatatttcaattattttaaagtgttaaaaagtgtttagttagaaacaacaatataagatagtaccacttgctcgtaattaaaatgcagttccaagttataattgtatctgcttttattctaatagaaatggagaagaagctgttggaagagaggtctttaaagcagaaagtggagaacctgctcctggaagccgagaaaagatgctctatattggactgtgacctcaaacagtctcagcagaagctaaatgagctgctgaagcagaaagatgtgctgaacgaggatgtaagtgtgaattacagtaaggaaaaaattaatgagccaataataaacttgctttattgcggaggtctagtggtgaatgcattgtattgtaatattttatagaatctgttggcttttaatggatttgatgatagaataaataagtcataattgaaaattttaagttagttacactttaaagactaaatttcagttttaaatactaccgatattttaatgtgaaatgaataagaaaagcatcattcttgagaaaaataatttacttaaatgtcaagtatacaatttactttttttaggttagaaatttgacattaaaaatagagcaggaaactcagaagcgttgtcttatgcaaaatgacctgaagatgcagacccaacaagttaacaccctaaaaatgtcagaaaagcaaataaaacaagaaaataatcatcttatggaaatgaaaatgaacttggaaaagcaaaatactgaacttcgaaagtaagttaattgatttagactgtttgatggaaatttctgggagagagagagagagtgtgtgtgagtgtgtgtgtgtgtgtgtgtgtgtgtgtattttattggtatttatttaaaatgaaagccagatctgttgatttttttatagtgccaatacttgggagggtgaaacaagagatttgaattccagagccagcttatctagcaagataaaataaaataaatctgaaaatacaagcacacattgtagctgttggattaatgacatgatgtgacatgtagcctcagaaaaagcctgtgtcagtgctgaaggaattagttttctttatgtgtattttttgttattttgttgttactgtgtataaagtctcattatgtagctgtggctggccacaacctcgcaggaatcttttttcttcagtctctagagaacaagggttataggtatgcattaccacacctggcttgcagttgttgaaattctttttttttttttttttttttgacaaggggcagcccaacctgggagccccgggcttgcttgcttctttctttctttctttctttctttctttctttctttctttctttctttctttctttttattaggtattttcctcgtttacatttccaatgctatcccaaaagtccccccaaacccacccccacaatccccttttgtttttgatgcatggtctcatgaaattctccaggctgggtttgaactcatggtccctcctgcctcagcctcccagtcgctgtgattacaggctctgccatcagacttgtcaaggatgagagcttttaaaggcaatgatcaagttagcactagtggacaatgacttgatttcagggagtcttactttcccatgtggctaggttaatatgtatgtaagttactaacaaagactttctgtattcacagagagcggcaggatgcagatgggcagatgaaggaactgcaagaccaacttgaagcagagcagtatttctcagtaagggacttcctgtagaagaactaggagaatggttgctttttaactaaaatagttatttatttcacttgatgtgtattcatattttaggtttaggcatgtaagtacaccatgtgtatatctggtaccctgcaagtcagaagagaggaagatgcgtagcttttgtttgtttgtccttgcttgcttgctttggttttgggttttaaaacagccttgctgtctgtcctaggctggcctccaatgtgcaaactttctgcttccacatcttgagtgctgggattatagtagtttaccaccacaccagacagatttggatggggccttacatgactcataaaaagcagacagggattggaatgtagctcactggtaaaatacttgttgtagggagaaggctctgatttcagtatgtagcaccacaaaatatgaaagaaaaagtactgggcaaaaaaactgtagattgtttaacaggaatcctttatcctactagtttgatggtgtgtgcttatagttgcaactaccatgcaggttaaggtgggaaggtgacttgagcctacaacattgagtatagtctgtacaacagaaagggagatactgtttcaaaacaagaaatcagctattgttgctaggacataattctaagcatatgcaattaccattttgtgaactgtgtgaagcctttttgagaaaatattttttttgttttgttttttaagtaatttattatgattttatttgtatcgatgttttgcctgcatatatgtctgtgtgagggtgttggatactagagttacagacagttgtgagctgctgtgtgggtgctagtaattgatccctagtcctctggaagaagtcattgctcttaaccattgagcccaaatacatgcttttgtaataaaaggaataaaattgccatattgacctttgtgggattcttgagagcactgtaaaaatatgaaatactttttcttccttccttcctacctttttttttttttcttttcttttctttttttggagaaacagtttctctatgtagtcccggctgtcctagaacttgctctgtaggccaggttggcctcaaactcagagatttacctgactttgcctcccaaatgctgggattaaaagggatgtgctaccacctcccggcaatatgaagtgtttttatgtagtagttccattgatctgtcaacttaaagaaagaaagatcagtgtttttcgtcacctctttatcctaccaacctgtacatttaactggaattacgttgtaatacccagttgaattattagctgattcttttagaagttgagtatgctggggactagacatagaacatgcaatctaccatacaaatgtttattaattggtgactagaaaatgggaaagcctacaaaacttttgatttctcaggagcccaaaactagtcaacagaaaaaattatatgtatatattgagctttttgaataaaagtcatgttcttggtaataatgggcatgcaattctgttttgctgcttagaccctctataaaacacaagttagagaacttaaagaagaaaatgaagagaagacaaaactttgtaaagagttgcaacagaagaagcaggatttacaggatgaaaggtaaggatggggccctgtcgcttgtctgtagtaagttctcttatatagttcctgctctgtttcccaccaagttaaaaacaaaaaatctgatgaaagtcaagtagacagagttttgacttcataatgaaaattgattattaaaatcctgtctccaagggatttaggacttagcttaggtagactatatgattagaatacaataccccctgaattcaatcctgttactgtatgcctaagttttttatgacatatctctgaaatacagagactctttggctgcccagctggaaattacccttaccaaagcagattctgagcagctggctcgttccattgctgaagaacaatactctgatttggaaaaagagaagatcatgaaagagctggagatcaaagagatgatggctagacacaaacaagaacttactgaaaaggatactacaattgcatctgtaagtaacattcttggtgtcttgggtttgtaattaaattactatgtcataaaatctcagaaccatctgggaactctcagttataaattgaaaagtgactatttttagcagattctaacagtctaactaaagaaacatttctgaggaaataccaacagaaagcagtcagtcttgtgctgacctactgaatgccacagtaaagggggtggatagttgacagaggcatatgcaagacctttgtttggtgcagatagtaatataaagcatagtcaataaatgcttttggaataatgggatttttggtgaaaggatccttactacttaggtaaagtgtacctagtttaagaaccaaatgtgaaaaatacaaacttgaagctatccgacagacctaatacttacctagacagagacagcctaaataacaaagaaaagatacttgaaatatatatattcagcagattagcatctagaatacatacagagcccctggacctcattgaagtagatgaaaccactcagaaggaaactgtctaaaagagacagctcaaatacatgagtggatgcttcgcttaactcttctccagcaaaaggtcaggtgaatgctatagctgtgcagtactgctgcacaccatttccacagctgaaaacaaaagcctgacagtttcacgtgtgtggaaaatggctttttaaaaaactaacaacaaaaaaatagagagttaaattcaatttctgataaatttaagtatatggtataaccctacggaagtccacactaagataactgcacagtgcttatagcccataatccttgtaaaaagcaaaccctcacatgtttccatcgataagcagtcgtggagggtggagacatggctcagtgcttaaggcattggctactcttccagagtaggtgtgattccccgcacccacaaggctcataactgtcttataattccactctagttccagagtatctggtgctcctttgtgacctccaaaggctgcacacatgctttaaagacattaaggcaaaacacttgtatatacaatacatttttaaaaattaaaaagaggtggtagtacatgcctataataccaacatttgggagtgtaaggtaagagggtcaggagttcaagggtaccttggctctacaagtaagtagaggtaaacctgtaatatgtgaaaccctatctcagcaaacaaactgaaaggtggtacataaatattgccacatattatttcatgtatttataatgccatatttggtgggaagttgaacatataaatggaagtaaatggaagttgaatctaaatgaattacatctttttatatatcaacagggtattgcattttgttgttccttattttaatcttgagatagctcagaattcacaatttttttcctgcctcctttcaagtgctggaattagaaacattcatcactgttcccacatagcatcttagttctcactatccctgtctgcgtgagccttactatgttctttagtcttaaacttacagacatcctcttgcatctgtctcctgagtgctaggattaaaggtatgtccaaaagtgtctagcaagtttaattccttaatgtattaaatgagtcataattttaaaaattacatatattatttcatttgtttataatggaaatttgcagtatttggtgggaaagttaaatgtaatttttaataaaacttcaggaaggaaggataggaatataatctgaaagaaatatagaaaaaaggattcaacttcttcaatagaaattcatttttttttctagccaggtggtgtggttcacgcctttaatcccaacacttaagaggcagaggcaggtagatctttgaacttgaagtcagggctacacgaagaatccctgtctcaaaaaaaaaacaaaaaaccaaaaaaaaaacaaaaaaaaaaaaccctcactttttattttaaagtaatatttcgaaagaaataccatggtttttaaattcgtttagcacaatggaaacacaagcctttgttttcactcttcttgatttattaagtggttttctcatttaaggaaaaaaactgctaaggaattttgaaagaaggaaatttttagctttttgggatacatatgaagttttgagggaacagcatttttatcaagggtaaactggtgtggtaacagggggagtgcagaggtgagcagtgatccagtgctctcaaattggattagtatttgacaactaaaattttataaattgatatgtaagggtttttcttcttctatttcttagcttgaagaaacaaataggacactaactagcgatgttgcaaatcttgcaaatgagaaagaagaattaaacaacaagctgaaagatagccaagaacgtatgtattagcagggactaaagcttattgtgaatatgcctagtaactattcttgtaactttaatatttctgtgtatttcagaactgtccaagttgaaagatgaagagatgagtgcagcagctattaaagcacagtttgagaagcagcttctgaatgagagaactctcaagactcaagtatgtcaccaggacggaaaggcggttttaaattttgtttatattcttgtcacctgttacttctagtgctatagggtagatgctaagctcaaagcaatatcactatttgaataattttgtgatttttttttttaattcaagttagaagaaacttcatgtatgtggaagtgccccacattctctcctagctttttattatttgctggtagcctgaaagagtcagctgatctgaaagggcacctgtgattattgacaaccctctgtgagctcccacagttagttgtatctgtagcataaataatgtgggtgctagtaccattctctgttgttggaaagggtacattttagtgccagtacagaattcacatcctttggagtaggaagaggaacacctgcctgtttaaatctcttttataataaaagtggaatcatgataacagatcaagcctgtaatttagcaggcaacacacctagggaacagaatatgcgaggcaagcattgtacctaagctacagtaatagccctgaaaacactttatcactctcaaaaatcatgagaaagtggacaagatagctcagtgaggaaaggctcctactatcaaaaatcatgagaatgaaaaactaattagaatacagaatgaagatcgatgaaaaaactatatgtaaaataaggcaaaagatattatgttgtatacatgtgtcatatatatgtatatgttcacatgtgtatgtgtacatgtgtggactgtgcatacgtgcatgaatgtagagaccagatgttggcttctaatgtcttcctatattactatctacctgctttttctctttcaagatttttatttttattcgtttatgtacttatgcccatggaagccagagaggtggagaggtgttggttctgctggagctggggtactgggtactccactggacttagatactggaaactaaactcagcttttccagaaaaatagaaagcagttttaaacattgagccatctctccagcccctctcccccttatctttgagacaagatctctcactaaatctagagattataaattgggcaagactaactgaccagtgaacttaagggagtcttctgtctctacctccactatactcaggatagagacatgcgtcactgtgggtaccacggatctgaactctggccctagtgcttgtacactagacacttgattcactttacatctctctaagcccaaaagaatttccttaaaaccctgtagacaggaaaggaattactagtgattatgtagctcgtaattgatgagtttctaagaaaacatcaacataatttattgtatgcttattttttaaggctgtgaataagttggcggagatcatgaatcgaaaagaacctgtcaagcgtggtagtgacacagatgtgcgaagaaaagagaaggaaaacagaaagctacatatggagcttaagtctgaacgtgaaaaattgacacaacagatgatcaaatatcagaaagaactgaatgaaatgcaggctgtaagaatactcttttccactgaaaacgttttaaaaaacaattattttcttatctttgcagaacattttgttagtatttattactgaactgtgactcacaattacaatgcacatttcatctgttatacattttcttacagcaaatagctgaagagagccaaattcgaatagaactccagatgaccctggacagtaaagacagcgacattgaacagctgcggtcacagctccaggccttgcatattggtatggacagttccagtataggcagtggaccaggcgatgctgagcctgatgatggatttccaggtacacatccttggtcagcccttgcatttgccttaaatttaagtcaggtgattgctttgattccatgaatgactttacttttaaggaaaaggtttgccatttctttaaaggaaatcctacttagaatgggattcacatgaccttttggacttgtttgattaaaaacgaacaagtaaataaattctaaatgtttaggagtataactcacatgtagtgcctatctgtttttttaagttttcacttttttcttctctcttctctgcctcactttcttgcttgtgggtatttagtccatatcactcagtcacacactatggaatccatgtctttcacctaccagcggtcctctacctctctcagtattgccactaagccctccagttctcacacgcttcttgactctgactctgaagaagattccttgccttacttacctagttcatcggagcctattagtacaggtgatatctgaaaacatcttcctggctttggaattctcccagctacttaatttgtctttctttaaaatgataacatttaactaacatccactcactccaacatgctgtttagatgcagtaaaaaataaactgctgcatgaactataattcacctttaaggcatttttcaaagagcttgtgattgtatttgctagattgtttgatttttgccaattttccagaaacaaagcactatgttctatatccttgaaagtgcatggcttcatctatttttcagacatttctgtagttctatatcaagagtgacagaatataaaaatacatgacccgtttcctagaatgtattgaggttttcacgtccacggtgtactaagccttcagagaacacatgaaacaatttggcttggttttcactctgaaaagtctcacaggtgaaatgcctggagactcccatttgtcttctaaactcactgatctctgtagactccagctttcttgtctacatgagggataaaattctgttgtgtggaactgtacagacatagagaacgtaaacatctagtacagttaatgcgtagtagtttaaacctgtaacgatttgtattattagaatattctcttagaatggcaccccctctgccaatttcatttgaaaaatgggatcaaatttattagcacagagtctaatgacttaagatactttcttttgttcattatagagttttactgattttgatattttagagcttagaaatcttggttatactgttgcttcttaaacagttttggtctatattttacacaatgaggatagccattctaaaatttcctgttttctgaacaggtactcatttaaagtgctttttactcaagagcataagtggtacacctctagtcagcttgctctccacaggaagaagaaagggcctgatgtagacttgcagtaacaagagctcaggggctcatgttgtgaattttgcctgtgcatgaatttaatcaatggagtattggatgttataattctgagtatttatttctgatgtcatgtgacctggattttgttcatgcttctactcattatgtgttattacagtgtcccaggtactgtgtggtctaaattccaaggggcagatttgactagctggtgatgtctgcattaaaattttactaaattcttaattgtcaggagagaatcagtttatttaccctcctttattatgcttacttatagaatcaagattagaaggatggttgtcattgcctgtgcgcaacaacactaaaaagtttggatgggttaaaaaggtaattactgcttctgaatatgattcctttggcttctgatttaactctagccattgtccttctggagttgtagggatggacatgcctatactttcagacacataagacctgtttatattttctgattttgtttatcagtgtggaagatttttgctctgcatgagttgtcactgaagtgggttttgaggttactacacaagagcgtgttgttctggcgctgttgtgtcctgttgggcagcagctctagagacggtgggaagaccctgtctttctgtgctgctgtgtttcttgctcacttcgactgggctgatgtagatccgctctctgtgtaggtctgaaagcttaacatagcagtttcagttttactgttagagaaaaataaataaaaatctattagtgaatctactgttactttaaggaaaactttcctaaagtatcattaatgctttttatttactttcatagtatatgaccttatcacaaatacagaatttcttataaaagaaagtaaatctagtacatagtactttcatcaatttctttctttcttttaacagtatgtgattgtaagcagcaagaagattcttttttatgacagtgaacaagataaagagcagtccaacccttacatggtgttagacatagagtaagtatcagacttacattaaagtcttaatgtgagaggaacagaactatgtccatcatgacagtcacagtgcagctctcgttctacagtccctttgatttccttagtaattgaaagttggcagtgtgatatggaagacatctatatttcatggctctttaatttgtagttatgttagaaataactggaacaataagataagctgctcaacctttaatcccagcagttgagaggcagacaggtggatctctgaggccagcatggtctacaatagtgagttccaggacagccaaagacatagtgagactgaccctgtctaaaaacaatagtaacaacaactgaactggtctattagcttctaacgtgagtcagtaaatagctgattttaaacttctggtattagtataaggtaaccaatgtaatataatccttgagtgatattttacttatttctttctttaaaaatcttctttagcaagctatttcacgtccgacctgttacccagacagatgtatacagagcagatgctaaagaaattccaaggatatttcaggtaaaaatgttgttcattctttcactcttagaagttctcatgtgacctgatattttagattcctttcttctcagtgtcatgttccctctggcttagctccagttgggacagttggggctttagagtgtgctgcttccatctgaggccagtactgtcctcctggtttgtttgttggtttatggtgtgcctctgagcttcgttgcacctttaacaagattggttgttgttttttagagtatgaacttagttctgttttggttttattctcaactctgggaattttaaaaagtcacttatcaagttgaaagctgtagcacttttactttttattaaaagcaaagccaagtttttccttttattgtctccatttaaaccattttcaaaccataaggcctagagcgctggctccgtggttaatagctcttactgctgcatgagaggatcaaggttcacagcaggtggctcacagatgcttgtaactgtagcttcataggctccagtgcccccttgtgacctccatggcacttgtgcacagatacacagatacacgcagacctctggaaacactgtaaaaatcactgcgcatgatctgatctactgcaggagagttgggtttttcccctctgagtgcttatgctgtctcatttggacatttatttacgtaattttcttttacccctcaactctccaaatatctaaaatgtgcatatacttcacctactttgctattcctcagaagtgtaaacagtaattcctatagttgtcattgtaaactgtttaggtggggaggtacactggatactgaacccagacctttgaccttccctcagctgtacttctagccctaaatgttgttcccagaggagtgaagaaaaaaagcccacctaattaagtggaaatttgtcttttgttggcctattctgatagttttgctacagcaaagtaaaagatactaaatcaaaagtgaggagacaaagtgactgtctcgtgtcgtttatgtaagctgtgtcttcccttaagatggaaattatgtctcaggcttttgtgcatgctaggtgggcatgctgccactgagccatgttcctagcttacataaactcttgaccaggtaaaccttcttaggtttgaacttcaactgcattttgctctagttgagtaatgtatcagaaatgttaagatataaaaataacaatgtggagcctagagagctgactcagcacttaggaacaagacctgggtttagttcccagcacccatgtggtagctcacaaccatcagtattccagttctagggtatttgatgccctcttctgacctctgagagcaccagtcatgtatatgatgagtacatacattcagggagaatagttacaaaacaaaataaatctttagtgtttagcagtcactttcgtcttcttcttgtttatagattctatatgccaatgaaggagaaagtaagaaggaaccagagtttccagtggaaccagtgggagaaaaatctaattatatttgtcacaaaggacatgagtttattcctactctttatcacttcccaaccaactgtgaggcatgtatgaagccgctgtggcacatgtttaagcctcctcctgctctagagtgccgtaggtgccacattaaatgtcataaagatcacatggacaagaaggaagagattatagcgccctgcaaaggtaagtaggaacgtcttgctgtgctagtccttgggcttccattgctttgagcacattaattcatttcaggtcattcttgttgtagtttattatgatatatcgtcggcaaagaatctattgttattagcaaattcaacagaagaacagcagaaatgggttagtcggttggtgaaaaagatacctaaaaagcctccagctccagacccttttgcccgatcatcccctagaacttcaatgaaaatacaacaaaaccagtccattcggcggcccagtcgacagcttgctccaaacaagccaaggtaatgaataaaaacatggtaaaaaaaattaaagctgctttttaaaagttgacttttatattcagactaaaaactttgataactacactttttctttgattgatattcttgtgagtcactggaaccaaatattttaaaattgtagtatacatgtcttgttcactgatgtggttaaaatatattttagaagttatgcatattcaatttaaccaaaatttaaaagtattttattatttttgtatataatcaaactgttttcatctttaatcagcatatggactaactagtgatttggaagatggtattaaggttacagacagactgtcacatgtcaggtgcacacacatactgcaaccttcttttagttaggtgatctgaaaggcagaaccaaaagcagtttcagttttaattcacatatgtgagtgcgaaacactgtgacctaaagagcagcacatttcagctttagtgtacatgcagagtgatgtgggcattgcttggaattgaagtggtgatacggtgggaggccagctatggctgtactgacctcatttcattatgtatttggcttcagaagagccatttctctttaggtaagcattcataaattttttaaaggatttatttatttatttatttatttatttatttatttattatatgtaagtacactgtagctgtcttcagacacaccagaagagggcatcagatcccattacagatggctgtgagccaccatgtggttgctgggaaattgaactcaggccctctgtaagagcagtcagtgctcttaaccgctgagccatctctctagcccctgcatctataaatattgtttctcattgagtgtgaaggtttggttagctaatgaaagaagtattaacctaggtcaggttccttgtcgcctagcaaaggaccttcagtatatgagtgataatgtgcactggctactatcagatcacaaacatctcccacaaatagctcatatgaaactttctggaagtagtatctcaaggaaataatttagaatgacaaaggaagaattggtgttttagcagcaaaatgattggatgttttatgtgtgcaaaatatgataaaatgagctgggtgtggtgacatataccattagtcccagcacttggggcagaggcaagagcatctctgagtttgagtccagtttggtcttcatgacttccacgacagccagagctgtatagtgagaccttgtctcaaaacaaacaaacaaaaaaattatggtaaaatagtgactccatgataatacttaagctatacactctcaaaaagtgctttctgatcaggttggatttagggacatgcatacacacatactggggtgggcggggagacaaaaattaataggagcccaaaaatgtctttaaaggaggctagagaggtggttcagcagttacatctaactactactactggagaggatgaagttagttgttagcactcgctttaggtggctcacaattacctgtaacctcaggcccaaggtggatccaacacccttatttggacttacatagctgtactcaacatgcacataaatacacagagaagatacacacatatacacataattaaaataaacaaatatttctcttaaaaatcccttaaaatacagagacactgaagaccatttgtaaaatatctgaaattttagttttaacaaatagatcctacagaaatgtccaaagatctgcctgcttctgcctcccaaaggcacataaagattatctgccaaaggtcacagtcatatgcagcaggaccaggtttcagaacctgcactcttagctgtaaattccactggaggaagaggaagatgagaaggaggaggaagaagaagaggagagcagaaattgttggcttaaaaaatgggcttgaaaatggtacttttagaatgttttcttagtgaagcagtgcgtgcctttaattctagcactagagaggcagaggcaggcagatctctgtaagttcaaggtatgtatagtgagctccaggccaagcagggctacatagtgagaccctgtctttaaaaaaagaaacaaagactcaaccttattgaggaattaaattaaaatcttagtttttatttgtaatgttatgctgtgtggaagctgggagaagatgtgccagtagaaaatggtaacgtgatgtagagatgaagcctgagtccaactaaaaagggataggtagactttgctaaaaaaaataataataataataataataataatattgacatgattgtttaaatacaagtttttcagtgacttactaacatttaaatcaagtactgacagtgaaataaaatatagagaagaaaaaatgaattcagaaagtgttttgttgttgttttattcttttcttttttcatttagttgaaataaccagaattagctgactgagtagaagaaaatgatagaaaggcttctagggaagtctgatattgaactcgtaacctattttattgactgtagttttatatataagagtacagtactggggcggggtagggtaaaagcacatgtgcaggcatggctccttagttcaatcctcagaatccttagtcaccaagtaaaacttgggtatgacagcacatgcctgtaccctgacgttaggtaccaaaatatggtcctgggacttaactagccaagctgcctagccaaaatggtgagtttcaggtctagtgagagactctatctcaagggaattgagtaatgaggaagatagaaccaacatccacctcagttctccatggactcatacacagatgtgtgtgtgtgtgtgtgacactggcacacacttcaaagacttcagaaggatgcaaaatagagagttccagaaaatatctgtaaataaagcttagatatccaggaaaggctactgagctcagtcttccaaacatcccaaacacttttgaaagggtaatttggattggcttgctttaagtttataatcgtgagccttcttggtctcctccctttgtcttggatggctatagtggtattgtagaggattccctgggcactacagggaatctggacagctgctgagctttcatacttcccaaagtgagtgtcaggataatttctcaaatttagccatctacatcagaaaccactctggctacttggatgtggtagcacatgcctgtaatgcgagcacttgtaaagcagagacaggaagaccaggagttcaaagctaagtctgatctacagtaagtttgcagccagccaaagctacataagattttgtctgagaaagagaaacaaaacaaaagaattgttcaggttatttaaacattcaaatattgggactttgctacttctgttcagtcgtatccagatctcagtacaatgtctgagaatacttaataggtgaatcctatacactaaagtttagagccattgaaatggtgatcacaggtgtaaccttggagatcagaaagctccttggcagaaattcatgagcatcacagtcatgaataattaaaggtttacccccaatccctgctttaagtaaaggtggttgcaacgttgcagtatagtttgtttaattggaaagaacagatcatgggtagtaaaatgtcttggtgggtaaggtaccatcatccctcaaaaccagatgataaagaggtattattattacagattgtcctctgaccttcagacaactttcatggcatgtgaatctgtgcttacacataataaataaatgtaattttcaaaaagtagaactatataaactgaagagaagctagagtattagttaaatttttttaattaaaaaaaaaaaaaatgacaggctggagagatggctcttccagaggatctgagttcaattcccagcacccacatgacagctcacaactgtctatagttacagttccaggagagctaacatccacatacagacatacatgtaagcaaaataccagtgcacataaaataaaaatcaacttatttaaaaaacaacaacaacaacaacatgctagcgctccagttttatgttcaattcatttagccaagttaaattaacaacaatcccacttacatgcctgtggctttctcttgttccttattagaatatagctgtgttgacctactcagcggttgttctggaattgagaaagctgtgttcctgttgttgctccctttcaaaggactttatcatttatgatgttatttattaagcaacaacaaaagacaacagcagttgtcagctggtaatgcaattccttttatacttctcaaattgagaatcagggtagctacatctttatctagaccataggaatgaatgggaagagcaaattatgttcttagcccagacatcatctgtcttgggttctctccagaggacccttctgcagtgggcctggtgaacatgaacctgcacatagatagcagtggaggaacttccccagtgtttgtatctgaactgttgccaccctgctcctgagaggagacttagagcattcatagcacgttctagccacagtgctgcgttctgaagtctataaagaatagagcatataaacttgcgaacctcctattacagattgcttgatttggcatttaaagactgggattggtcatttgatgatgttgatggtgatgatgatgacgatgtttttgatttctgaagaaataaatgggtaaatcaaaaaaaaaaaaagaatgagtttttagtacttctatgtagtgcatgtggtttgcacttggagtttcgttttctctcttttttggataggatatgttttaaaagtagttttcagaaatacttctagtctaaccagattttctgtgtcaagtgtaaaagtaagatgctatattcaaatgcactcttccccccccctccccgttgatgtttgtttgtttgtttgttttttgagacaggatttctcttagtcctggctgtcctagaactcattctggaccaggctggccttgaactcagagagatccacctgcctctgcctcctgagtgcagggattaaaagcatgtgccacccctgcccagctatgttcagattctttattggctatagattttcagtattgttgtagttaaaatatttgatctttaaaaaataagcatatataagtaagagaaggaacaaagtctggtgcctttgattcattccacagaagctgtattcagagaattgaaatttaatgttttcagttttagactagtttgtgaacatagcatgttttcttcccctctctccattctttctccttccttttttctaatttacaagaattaaagccataaaaccttttcaagtctgatacatgcaatgaattacctacctctttctgatttgtctttgtgatgtggtgagaatttaatgctacccttgctaaaaagaatgtgagtggcatgctgtgtagacttctgtctaatgtaaagccaggcattgtggcccacttggggattgggggtaggaacaaaaaatgaggagttcaaggtcatcttccagctacatagtaaattttggccagtttaggctatatgagaccttgtctcaaaaagaatacagtaggcattgcaacatgcaaggctgcagttcccactctgcaggctgaggcaagaggcttagtgagagcccataccatttcaggctggatagtgagaccctgcctcagaggacaaaaaaggagagtgtaaaatggtttgcttaagaacaaggttgagtgtgtctggtgacgcacacccttaatcccagtgcttgggaggcagaggcaagcggatttctgagttcgaggccagcctggtctacagagtgagttccaggatagccagggctatacagaaaaaaacctgtctggaaaaaccaccaaaaaaaaaaaaaaaaacaaaaaccacacaaaaacaaaattgaatgaaagttaagtcttaggactttatgccttcaaacagaatagacacatgagtaatctgtgtcaactgaccgtgttggaggacatgtacttacatcatgtaatactgcctctatatccaggcttgtgtatgtcttatatatgtatactacagcgtgcttattccttttagtttctttattttgtgataggaaggatggaacctagggccttgggcttgttagacaagtgttcgacccctagctgtactctagcggctagagtctagccctttcgttcctatcttacagttagggaaaatgtaccttgaggtcctaaagtatgtagagccagaccataaatcctactcttccagctgtatagggcagctagaaactcagcattccaagaccctgctgtaccctgtttagccctaatattgctgattaactgcactgaatgtttgtggccagtatggggcttagaaagtccattgttacatttagaaagaatgcagttgcatgtacctaaaactaagaaatacaattgaatttgttaatgcatgaattgggttttagaggaaatatagtttaatgataaaagtgaaatgctctcagggaatttaactgtctcttaactgtatcaactaacattattttcccttcttttctagctaactgccttctatgaaagcagttattgaaggtgatcgtattcttccagctacaagactgaaataagatttctcaaaactaaaaggctatattttactgagacacatacatacaccacacgtgcgcgcgcatgcttgccctaccttcccccctgaaataattacaaattatgaagaggttttttctgggctactttgaaacaagttgaacaaaagtggtcggtgagtaaaggtgtcctgcagttctcccagactgcgtcataaagtcacactacattgcacaggactgagaagagtttaaagaaatcacatttcagcttcaacagagggtttcaccagcacattagccagaagaatttgggagtgaatcccactacagcgatgctgactgcatctttaagaagtgaccatgatattgtgttcatgtatgtatatacatatgagttgagcctcatatagatatgtacacacatacacataaaacacattgtactgtaatactgcaaggttttttttaacttaccattttattttttatacacattaatcagctatcattatttcagttgcaactatgcacttgtataaagccataatgttggagtttatatccttcattcatgtacctgataaggagttgcatgtttgtgtaaaaaaaaaaataactgtaacaagaagtttgaagttaattattccagtttcctaatgcttaaggtaggcagctttacccattttgaatgccttaatttaattttctctccccccaaatctcagcccttttctatatttaactaaagaaagaacaagtgtttaccagctcttaggatgcagcttgctttgtggggaaagtagtgcacaattttatgtgtagtagttatatcagtgttggcctatttgatgtatattggtttttaatgtacttggtcatagaaacaataatggattctattgaaactaatgtgtgtgatgtacctctgttactgttttcatccctttttgcagactttagcaggtctgtgactatagaatatttcctttgctttgaactttctggttaccttagatgtgtttttatttatggtaaagataatttttcatgttttcattcaatattcaaaaattgtctcaaatataaggaaaactaacatgtactgtgtagatatattttaaatatttaaatgtgatcctaaaaaaaaatctgtgtgtggcaatatttcagctttgatatctgggaagaggcagcttcaaaagtgcttaatttgattttcactgttaaatgctgctgagggtagagaacaggtaggacctatcctgccatgctactggcccaggtaagtgtgcttaaccccacagcagagtgcagcagtgagcagcatcaggctctgtacatatgcaaagttcaatatgacattgaaatgtttgcctgatattttagtgaaaccagtagacatttttgattgcttccttctagggtcagtgtagagatgttgtaaaaactttgatcctcgctatagttactattgtggaaatagtggctgttggcccactgatatactaaatccagttctgtgaccttcagatggcccagtttgcatctttcatgctttctgttaagattacatgtgcatgccatttccctggaagcagctgtgctctggttgggaacacaacttgcttcctccctcttctccctccctccttccttcaggtttaaaaatgaaaatatataaaatttatatagaagaactatttccattcattagagttgtttaaaaggagactgaattaatattttatataaagattttgttactatgggaggttctatcctattctgaattggagagtatatatatatatatatttttaataaactttattaaggtgaaataatgtcaagtttacacatgaataattgaagtatttgagtaaaaaaggaaaaagttttaattttggatgctgttcgtgtatatatgtgtaagagtttggagaatcatgatgtgatacaactgtataaggcaattaatgtgaaggattcaggggaataaaacatcctgaggggtgaaaaaaaaatctctccatggagcgtcttcacatatggcttactagggatttataaggttatttgtccaacagtcagaattccaagtaaaagccacacgaccttagagaagcattcactcttcgcactcatctccatgtatgtgggtgcgcatgcctgccatttcctccccaaaccaacagtcattacaacaacaacctaattttgtgccagtttctttttttcttgaggcctccaatccttcaagataaatgtgtaccagcacaaatactgcttcctttggtcccccagagctgtaaatacttggcatttgggatctaaaagacaaggaatgctgggtttccttagttggatgctattcttatcctttgtggaaataaaaaagacagacgtaaaagaaaaacttaagtaccagtattactgttgaaaattaatgtagaattaatttttaagcgttaattttcagtaacatctcaaagcaagattaaaacaaaacaaaactgtgatcccaagggaaggctgctgtttgtggccaacctttgagaggccatggccctagagggctttgctcagttcatgtgtagatcctagtgagacatgctcgaggctgccaaaccaactgaagatggcatactgctgctgtcagtctgttagggttcccagggtgaaggaagagaaactcagacactaactaaccttgtagagatgcgttaggcagcatggtgaagcccccagtaaagcacgtagcttccgagcttctcaggcccttgactgctactgattcttttttttctgactgaagatgacttcagctcccctggctcgtggaggtgccacagccaatgttaaagcactttgacaagcactgtgtgacagtgctgagtgttgttccctgggacctcacctttgttcctttccctgtggtgacttttgtttgcaactgtaataagttataaactgcatgatttagagagtcatcttggatcagtcccttcccccaacaaaaaaatcatcccctcttgatttattttttattttgttgcatctttgtagtaatgtaattgtatttttatgcctgctttttgtttaaaaaaataaataaaagaaactaagatgtaagcatcttttcctgtgaaatagttgtggaatgctgcagcttcttcacctgtcttcttaaaggatgctaatagtagatgaggtgatgtcatcatagtgaaatcacttctgccttacatcctggagagtttagttctagagtccgcctccgattcactttgggtatgcaggcttaaacatctgattccaggtggaaagggtagagggcagagagtgcctttctgtctgaaaacagtatgatggacacttcctagaaggtgtcttactgggaatctatggctgctttttgttctggggttgggtattctgtaaactggagactgtctacttgttggtttgaaatacgatgatagtgcatgtgagatagctgtagtaactcagatattccttccaaaagtggggaaatggccagtgatggggatgcatgctggtaaaatacattgaagagatgaaggcagaaagatgagtctgaagccagcttgggtaactaaaggggaaagttttgggggttggttggttagttttttggtttggttgattttttttgtttttatttaaaggaattgctttaagtagtgataaaagtcctgattgaatatatggaaaacacttgtagtaaagactacaggttatattaaattaattaacaagttaacggtctgattgtcagtatatgtgaggaaagatgaactggttgaaataaccatagaatgatttatgtttagatgtagtatttctctcctccgggtccaaggcaattgacctaaacaagattagctggcttgctagtgagttatacctacctaactgaaaattcatgacagcttaagaattcgggggcgttcaacaaattaaagtttattaaatatagaaaactaaacatttttcagtaaacttcatttactttcttgcagtataccagagtaatgacattcacttagaagaagaaactgagcttttaaaggctggatttataaaacatcagaggaagttctgcagacaacagtgtttaggatatgcttaggatattcttactttagtatgaataaaatacctaagaattggctaggacttagcaatactttttactgtatgtataccttccagtaactaaaacttatacaaagttccaacagtggtaattgtgagatatagccctttaaaaaatggtgggattgtgcttaaatagagagacagttgagatttcctcgtctaaacagatggggctctgtttagtaaggcacactgtgttggacgactgcttggtatatgaacccagttccatctctgcatactttgctagccctgcttagcttgagaggatgttatactgcattatgtttatggaagagttaaactgcccaggtgtgaacagttccacttgttactgagcagaccccactcattgtgggaagactacttaatattctgaaagccacagtgtagctgtagctggctcttcggggaatataatcatgactttaagggtgaagatggcctcttgggcaggttccatcatttgagttgtcaaagtcaagagtggtccactcttgtccagcactcccagtgctcaaaaggctgctggaggatcacaggttggaggatagcttgggctatatagcgagactttatcttgtggggaagggagggacaaaaaaccacacacaacccaatctaagcccttccacaacctagggcactgggggaaggaagttggcattttatacaagtgtctctttccgtctctcctagtcttccttctctgagtttgctgtgtagcccaggctacctcagactcccaagtgctgggattataggtttgcacttcccgtattcagctaagtggctttttcaagtttaacaaacctgctttaaagtttctgaaatggttgactagtaaaagattttaaatgtagcaatggaaagcaatggtgcatcatctggtccagtcgtttgaagtccactgtgtgtaggaagaagacatccatcattcagctttggtgacagacttccggtagtgaagtactgttgctgttacccatatatttaaagccaacatgatcacaaaacgtataagaactgaaataaattaaaagaaagtttcaacattaataaaactgggcattagcctggcgtggtggcgcacgcctttaatcccagcacttgggaggcagaggcaggctgatttctaagttccaggccaacctggtctacagagtgagttccaggacagccaaggctacacagagaaacactgtgtaacccccccccaaaaaaaaaaaaaacaaaaactggacattatactgctttaattagaagcctatgtaaagtttcaccctgactccagacaaaacaattgagattgtgagagcattggttccagacagtctaggaaaaggacgttcctgtagaaatgcccacctgggtactcagccatgcatcctgagtggttcattgaagtaatacagccctggctgagaagttcaactaagacccctttgcttacgtctcaaggatatggctgtttcaaagtgctgtgctctatgaagacctttttagtaaggtggtgggccctgcttatggatccctgaggaaggctgagggaggaggactgcctgaggcctgagtgaaaagccaacctgggcagcacagcagatttcacctcatgagaaatgagcccagagtcagtacatgttgtataatgaagtagtcacttaaaaatgtgactgagagggctggagagatggctcagtggttaagagcaccgattgctcttctgaaggtcctaagttcaaatcccagcaaccacatggtggctcacaaccatctgtaatgagatctgatgccctcttctggtgtatctgaagacagctacagtgtgcttagatataataataaataaatctttttttaaaaaaaatgtgactgagagaccatgagaacagtggcctgccctttaagacatgaaagctgtgtttgttttatgacaggtctcactgactaattctgtagctgaggatagctttaaacttctcattctcctgcgtctgcatcctaaatgctgggattacaattttagacatgttgaatattgaagccagagctccctacatgcaaggcaagccattttaccaaatgagctacatacatatgtcatagtagcactgtgtgtgtgtgtgtgtgtgtgtgtgtgtgtgtgtgtgtaggggtgagtggatggtggtgtccttatgtagccttggctggcttggaactttttgtgtaaccaggtataccctgaattcaaagaaataagcctgcctctgtctccccagtgttgggattacaggcatgcaccatcagtcccagctagccacactgtttttaaaagctagtcactcaggaacagtggtgacagataagaaaaagcctacagtgagagcattcttggtcttttaaatacagacttcatatgtgcaggttctttgctgttcaattacgtcctgtccttcctgtgaactcaagtcccacaggacaaggtctgtctccttttctatcctgtcactaaagtcagagctgacaaaagtatgggacttcacttttctaaagctcgctttctcaatgaaaggtctggtgctgaggacatttgccacttactggataggtttctgttttgtcactttccaaagatgttgggtccagagttgagaacagcttaaggaattaatctctttcagttagccaaagtattttcttggctttgtttcatgtgtgtgctcagtgccctaaaacacagtaggaggtgtctttctgctcaaaggcatgccttacttcttgtctctctggcaactgccagcctcactttctccttcgtctcccagcttccctgtccctgtgtcctgaactacttgctatggccagccctggccatattgggtgtcactcctctgatcaaatccttatttagcttttaagaccttgccccctctggagactctgctctcagctccctccaagtacaccgggctccttcagctacccaacccgctggtctctctctggtgtctctcatttttgttttggaaactgtttctcctaggctggcctggctctgtggcctcagctgcttaagtgtatgaaactagaagtgcatgctcccacacctatgcctattctgaaaacccatttcacagcataattcagcagttaattgtgggactcctgttcaatttccttgttgaagtagaaacttcaggatgagtgttgactcccttggatatgttcctccccgaggactgcaagaagatgcttaatagagacagccaccactgttgtagactaaatgtatgtgattttgtcttttgaatctgtagcccaattcagtcaaatggatctgttaagccttatgatggattccatgtggagatccaagtttcgccaaaaatatgcaaataggaagtcagaggtttttacttacttgtcaagtcattggtggtcattaaagttgttattattcttgctgtaaaagaaaattcatagaaataaataacttgattcccacacattttgatatttctatttagctcatgcctttccattttactataacgatatatagtaacttcttgaatggcattgatgggacccttattaatactgtattgtgtaaccatctaatgacaagccatgcactctgacccagtcatatagaagctgctcacaaaagcagaagtgatttgtatcagtagctccgcactgccagggagagttccaatctctccatgtgcccaccctaagaaaaggaaaaaaaaacttaaaatgcctcatttgcatattgagcttccagcactttagctgaagaaataaggattttaaacgtgtgtgtgtgtgtgtgtgtgtgtgtgtgtgtgtgcacacatgtgcatccacacatcttatgaagatataggtagataggctggagggatggctcagcagttagttaaaagccctgaatgcttttccagaggacctgggttcaattcccagcaaccatgtgggggtatataaccctagtcccagaggctctgaccccctcttccagcctgtgagggcaccagctatgcatatggtgcatatacataaatttgggcaaaacactaatatacataaaaaatttttaatgttttaaaaaaaccatatgttttgagacatgacctgactgtaccgctggctggccttgaacttgcagagacccagctgcctctgcttcctgagcactgtgactaaggtaccatgcttggcaaaaatctttacacatttaataaaactccgcctcatttttcataggtgagaaaaccaaggcttgagaaaacaagctcttctgcctatccagtgttctgtggggtttgttgttgtttagttcctttctccattaacagccctctgtagtgaacaggaccctgggtaacagttgaagccagtactcagtcagccgcagtctgcattacaccctcttgtacacaaaggtgcccttagcaggttctgttgaatagttaattacaaaagtattagtatgaaaaagacctcaggcaatcagttaaacccaggaagatcctgatattgatgaaacccagttcctagagagtggttatcttacttgcacaggtgtaggcagaaaggccccaggtcagtgcgctcacagctcctgaatcttgtaccttccacaaatactggagctgggcaaacttactggctgcactaatgactgtgcataagttctattgggataaaatgagagagtcaggaacctaaaaagataaatgactacatacagtgctttgcttattttttatttatttaatttttttctttaaatgtttgattctctggagaggagactcaactcatgggaaccattttcttcccaccatgtaatcctggggattgaactcaggttgtcaggcttggcagtaagcacctttaaccacagcgtcatcagcccagatacagtgctttctaagccagattttcaagtcttgccatccccaacttgctaaggtttgaaacctcaatttgatgaagagtggctctcggctacctctgtggaagggggtgaattggccagagatagtggaagaatcccagacctggctgcagacttacctgtcccctcctctcccatcctgggatggcacttaactgaccaacttccaaactaacgccaaaagctttgtgtcttacttcccatcctgagtgccagtctcctgtgacctctcagaaaaggaagccttgcaaattgactatcaacccaccaggccccagctccacagcagcttctaggcttagacaggccagagggaggccactgtagtcacacccaggctgagcaggatggcacgagcagcattcaagaattcaggggagtgaggaggcagaacatattaggaaggaccacagaaagtgatgtgtttggcaatcaggcaagagaaccaagtgaatagtagacgtcctagtctatagtgaatgtttgaggatggtgcatgccaagtgaggtgggactggctttcccagggcccttgacaggctctggaggacagtgcctgctctgcttcctgttgagacagtagcacctatatagatggcctccataggtccttgagggtggagatagagctatacggggaagaaccatggggcaaggagtgccagagtgtttgggggcagaggagggggcagtgctattgccagacctgaacagacaaaagtgacagtgggagctgggcaggtggcttgaagaaatgctgactccaaccagggaagcctgtgggaaaacagctcttgagaaattggggtgctgaataaagcaaaagaagagggccaggtcaaatcagtgtggtaggtaggagccagtgagagagagacacacaccgagcaggttacaacgtggccatgtctgaatggacaagctgctcttgagtgtttacttgtcatgacacagctaactttgagatcaaggggtaatgtttgactgggccataagagaatcctggtagtgccagcacacgctccaggaaagcatcgtgttttctcaaacagtccagtgcaggcaagggactgggaagcagagatgtgaatctgctgcatgtggtcattgcaaagtactagtctccaattctgccagggcacaggtgcacagtaatgcttgtcgaggaactgaaggcgaagtcagagtggaggaaaggggaaaattaattttttaaatatgaagctgccagggatggcaagatggctccatgggaggaggggagagattgctgtggggcctgatgatctaattttag

SEQ ID NO: 1523 - DNA, 4652 bp, Mus musculus
cggcatgagccggcccccgccgacggggaaaatgcccggcgcccccgagaccgcgccgggggacggggcgggcgccggccgtcagaggaagctggaggcgctcatccgagaccctcgctcgcccatcaacgtggagagtctgctggatggcttaaattccttggtccttgatttggattttcctgctttgaggaaaaataaaaatatagataacttcttaaatagatatgagaaaattgtgaaaaaaatcagaggtttacagatgaaagcggaagactatgatgttgtaaaagttattggaagaggtgcttttggtgaagttcagttggttcgtcataaggcatcacagaaggtttatgcaatgaagcttcttagtaaatttgaaatgataaaaagatcagattctgcttttttctgggaagaaagagatattatggcctttgccaacagtccctgggtagttcagctcttctgtgcctttcaagatgacaggtacctgtacatggtgatggagtacatgccaggcggagacctcgtcaaccttatgagtaattatgatgtacctgaaaagtgggccaagttttacactgctgaagtagtgcttgcactggatgcaatacactccatgggcttaatacacagagatgtgaagcctgataacatgctattggataaacatggacatctaaagttagcagattttggcacatgtatgaaaatggatgaaacaggcatggtgcattgcgacacagcagttggaactcccgactacatatcgcccgaggttctgaaatcacaaggaggtgatggttactatgggcgagaatgtgattggtggtctgtaggtgttttcctttttgagatgttagtaggggacactccattttacgcagattcacttgtaggaacctacagcaaaattatggatcataaaaattcactgtgttttcctgaagatacagaaatttctaaacatgcgaagaatctcatatgtgccttcttaacagacagggaggtacgacttggaagaaatggggtagaagaaatcaaacagcatcctttctttaagaatgatcaatggaattgggataacataagagagacggcagctccagtggtacctgagctcagcagtgacatagacagcagcaactttgacgacattgaggatgacaaaggcgatgtagagaccttcccgattcctaaagcttttgtgggaaatcagctgccttttataggatttacctactttagagaaaatttgttattaagtgactctccaccttgtagagaaaatgatgcaatacaaacaaggaaaagtgaaattcagaaaaaattatatgcactagaagaacaccttagcagtgaggtgcaagccaaggaggagctggaacagaagtgcaaatctattaatactcgcctagagaaaacagcaaaggagctagaagaagagattaccttacggaaaagtgtggaatcaacattaagacagctggaaagagaaaaggcccttcttcagcacaaaaatgcagagtatcagcggaaagctgatcatgaagccgacaagaagcggaacttggaaaatgatgttaacagcttaaaagatcaacttgaagatctgaagaaaaggaaccagagctctcagatatccactgagaaggtcaatcagctccagaaacaactggatgaagctaatgctttgctgagaacagagtctgatactgcagcacggttaagaaaaacccaggcagaaagttccaaacagattcagcagctggaatctaacaatagagatctacaagataaaaactgcctgcttgagactgccaagttaaaacttgaaaaggaatttatcaatcttcagtcagctttagaatctgaaagaagggaccggacccatggatcagagataattaatgatttacaaggtagaatatctgggttggaagaagatttgaagactggcaaagccttactagcaaaagtagagctggagaagagacagctgcaggagaagctcactgacttagagaaggaaaaaagcaacatggaaatagatatgacatatcaactgaaagttatacagcagagtttagaacaagaagaagctgaacacaagaccacaaaagcacggctagcggataaaaataagatctatgaatccattgaagaagctaaatcagaagccatgaaagaaatggagaagaagctgttggaagagaggtctttaaagcagaaagtggagaacctgctcctggaagccgagaaaagatgctctatattggactgtgacctcaaacagtctcagcagaagctaaatgagctgctgaagcagaaagatgtgctgaacgaggatgttagaaatttgacattaaaaatagagcaggaaactcagaagcgttgtcttatgcaaaatgacctgaagatgcagacccaacaagttaacaccctaaaaatgtcagaaaagcaaataaaacaagaaaataatcatcttatggaaatgaaaatgaacttggaaaagcaaaatactgaacttcgaaaagagcggcaggatgcagatgggcagatgaaggaactgcaagaccaacttgaagcagagcagtatttctcaaccctctataaaacacaagttagagaacttaaagaagaaaatgaagagaagacaaaactttgtaaagagttgcaacagaagaagcaggatttacaggatgaaagagactctttggctgcccagctggaaattacccttaccaaagcagattctgagcagctggctcgttccattgctgaagaacaatactctgatttggaaaaagagaagatcatgaaagagctggagatcaaagagatgatggctagacacaaacaagaacttactgaaaaggatactacaattgcatctcttgaagaaacaaataggacactaactagcgatgttgcaaatcttgcaaatgagaaagaagaattaaacaacaagctgaaagatagccaagaacaactgtccaagttgaaagatgaagagatgagtgcagcagctattaaagcacagtttgagaagcagcttctgaatgagagaactctcaagactcaagctgtgaataagttggcggagatcatgaatcgaaaagaacctgtcaagcgtggtagtgacacagatgtgcgaagaaaagagaaggaaaacagaaagctacatatggagcttaagtctgaacgtgaaaaattgacacaacagatgatcaaatatcagaaagaactgaatgaaatgcaggctcaaatagctgaagagagccaaattcgaatagaactccagatgaccctggacagtaaagacagcgacattgaacagctgcggtcacagctccaggccttgcatattggtatggacagttccagtataggcagtggaccaggcgatgctgagcctgatgatggatttccagaatcaagattagaaggatggttgtcattgcctgtgcgcaacaacactaaaaagtttggatgggttaaaaagtatgtgattgtaagcagcaagaagattcttttttatgacagtgaacaagataaagagcagtccaacccttacatggtgttagacatagacaagctatttcacgtccgacctgttacccagacagatgtatacagagcagatgctaaagaaattccaaggatatttcagattctatatgccaatgaaggagaaagtaagaaggaaccagagtttccagtggaaccagtgggagaaaaatctaattatatttgtcacaaaggacatgagtttattcctactctttatcacttcccaaccaactgtgaggcatgtatgaagccgctgtggcacatgtttaagcctcctcctgctctagagtgccgtaggtgccacattaaatgtcataaagatcacatggacaagaaggaagagattatagcgccctgcaaagtttattatgatatatcgtcggcaaagaatctattgttattagcaaattcaacagaagaacagcagaaatgggttagtcggttggtgaaaaagatacctaaaaagcctccagctccagacccttttgcccgatcatcccctagaacttcaatgaaaatacaacaaaaccagtccattcggcggcccagtcgacagcttgctccaaacaagccaaggtaatgaataaaaacatgctaactgccttctatgaaagcagttattgaaggtgatcgtattcttccagctacaagactgaaataagatttctcaaaactaaaaggctatattttactgagacacatacatacaccacacgtgcgcgcgcatgcttgccctaccttcccccctgaaataattacaaattatgaagaggttttttctgggctactttgaaacaagttgaacaaaagtggtcggtgagtaaaggtgtcctgcagttctcccagactgcgtcataaagtcacactacattgcacaggactgagaagagtttaaagaaatcacatttcagcttcaacagagggtttcaccagcacattagccagaagaatttgggagtgaatcccactacagcgatgctgactgcatctttaagaagtgaccatgatattgtgttcatgtatgtatatacatatgagttgagcctcatatagatatgtacacacatacacat

SEQ ID NO: 1524 - protein, 1378 aa, Mus musculus
MSRPPPTGKMPGAPETAPGDGAGAGRQRKLEALIRDPRSPINVESLLDQSLVLDLDFPALRKNKNIDNFLNRYEKIVKKIRGLQMKAEDYDVVKVIGRGAFGEVQLVRHKASQKVYAMKLLSKFEMIKRSDSAFFWEERDIMAFANSPWVVQLFCAFQDDRYLYMVMEYMPGGDLVNLMSNYDVPEKWAKFYTAEVVLALDAIHSMGLIHRDVKPDNMLLDKHGHLKLADFGTCMKMDETGMVHCDTAVGTPDYISPEVLKSQGGDGYYGRECDWWSVGVFLFEMLVGDTPFYADSLVGTYSKIMDHKNSLCFPEDTEISKHAKNLICAFLTDREVRLGRNGVEEIKQHPFFKNDQWNWDNIRETAAPVVPELSSDIDSSNFDDIEDDKGDVETFPIPKAFVGNQLPFIGFTYFRENLLLSDSPPCRENDAIQTRKSEIQKKLYALEEHLSSEVQAKEELEQKCKSINTRLEKTAKELEEEITLRKSVESTLRQLEREKALLQHKNAEYQRKADHEADKKRNLENDVNSLKDQLEDLKKRNQSSQISTEKVNQLQKQLDEANALLRTESDTAARLRKTQAESSKQIQQLESNNRDLQDKNCLLETAKLKLEKEFINLQSALESRDRTHGSEIINDLQGRISGLEEDLKTGKALLAKVELEKRQLQEKLTDLEKEKSNMEIDMTYQLKVIQQSLEQEEAEHKTTKARLADKNKIYESIEEAKSEAMKEMEKKLLEERSLKQKVENLLLEAEKRCSILDCDLKQSQQKLNELLKQKDVLNEDVRNLTLKIEQETQKRCLMQNDLKMQTQQVNTLKMSEKQIKQENNHLMEMKMNLEKQNTELRKERQDADGQMKELQDQLEAEQYFSTLYKTQVRELKEENEEKTKLCKELQQKKQDLQDERDSLAAQLEITLTKADSEQLARSIAEEQYSDLEKEKIMKELEIKEMMARHKQELTEKDTTIASLEETNRTLTSDVANLANEKEELNNKLKDSQEQLSKLKDEEMSAAAIKAQFEKQLLNERTLKTQAVNKLAEIMNRKEPVKRGSDTDVRRKEKENRKLHMELKSEKLTQQMIKYQKELNEMQAQIAEESQIRIELQMTLDSKDSDIEQLRSQLQALHIGMDSSSIGSGPGDAEPDDGFPESRLEGWLSLPVRNNTKKFGWVKKYVIVSSKKILFYDSEQDKEQSNPYMVLDIDKLFHVRPVTQTDVYRADAKEIPRIFQILYANEGESKKEPEFPVEPVGEKSNYICHKGHEFIPTLYHFPTNCEACMKPLWHMFKPPPALECRRCHIKCHKDHMDKKEEIIAPCKVYYDISSAKNLLLLANSTEEQQKWVSRLVKKIPKKPPAPDPFARSSPRTSMKIQQNQSIRRPSRQLAPNKPR

SEQ ID NO: 1525 - DNA, 183373 bp, Homo sapiens
  misc_feature (1)...(183373): n = A,T,C or G
aaattcacagcatttagatacaataactaatcttgttacttcaccgatggagcttagtgagacctgggggtcatcctgatgggtcccttcccctcctcttccatgcccaaacccaagctgggggttgtcgcaggttacagacttcggaagtgtgcccgcagtcctatatttgcatggccccttcacatacattttcttattttaatgcagaaatcaagtctgtggtgtagcttttaccagtagggaagagttcagcagtttgtgacttgctcaaggtcacacagccagtaagtggctgtttaatatctgtccctctccattagatcattagtttgataatggccaacagggattatttctctgttgttcttcactgtattaccaggatataaatatctttgttgaacaaacaaatgagaaaatgaatgaatgaaagaaacaacagctggaatcctatcagcttctgccaggtgagaaggagccagcctttctggagtacctttccataggccgaacgctgtctgagccttctcttacttgttcctcaccagaatcctaaaagagaaattgaagctcagagaggtgagttaatttgcctgaggccacagaggtaaaaagggacagacaggcctggaaccatgtttctctgactctattgcaggtggcctcatccccactgctcgctgcctgttcggagataggaccttgaccagcccaccctcccagccttgcagctctgacttttggtggactgtcctcttccatgctcacttcttggaggctccaactttgtttaaggcaaatggaatatgacaaaggcaaccgtggccatcaaaatgccactctaaatgccgggaagtttaaagtgggtcctcattttgcaataaggcaggcttttatggaaactaagtgtatcccagtattctaatgatcaatcactttaactacagttttcttctttgtatgctttgtaagtttttaattaatcatgatcatataccacctaattacaaatggtggcctgtggatgagtaaaatatcccccaaactggctttcttcctctctgctgtgtcgcaagttccacacgatcttgcccatgactgctgcaaggttccctcccacctgcctgcctacatagcgcgacagtagcagagggtggtgcgatcagaaagcccttggatggtatcctatgttaacatttgcaactgcagtgagtcctggaggacggcactgtggtagtttctttgacatcacattgcaagttagtacaggacctgggctttccctcatctgctttccactgactaccccccatcctctttctgaccacctgtatgcccttttccctagtcatcactcatttttccttttatttacttcctactttcccactcctggcctcattctgcctggaggaatgttctctctttctgtttccaaactctgctgaatttttgttgctgttgttatttagtttttatttcataatcataaacttaactctgcaatccagctaggcatggaagggaataaggaaaacatggaacccaaagggaactgcagtgagaacagaaaggttataggatactgtgagcaaatggggtggaggggacaatatggtttgtctgtgtccccattcaaatctcaacttcaattgtagctcccagaattcccacgtgttttgggaggggcctacggggaggtaattgaatcatgggggctggtctttttagtgctattcttgtgacagtgaataagtctcatgagatctgacggttctatcaaatgtttccacttttgcttcttcttcatttttctcttgccaccaccatgtaagaagcgccttttgcctcccaccgtgattctgaggtgtccccagccacgtggaactgtaagtccaattaaacctctttttgttcccagtttcaggtatgtcttctttatcatccccataaaaatggactaatacagggctactctcctgacctacagaaagaatggtctggtggttaaggtaaaacacaggtcaaacttaccagagttgtccacaatcagcaatggtgatcttcttgctggtcttgccattcctggacccaaagggctccatggcctccacaatattcatgccctctttcaccttgccaaagaccacatgcttgccaatcaaccactcagtctaggcagtgcagatgaaaaactgggagccattcgtgttgggtccagcttttgccatggacaagatgccaggacgtatacgcttcaggatgaagttctcatcatcaaatttctccccatagagggacttgccaccagtgccattattgtacgtgaagtcaccaccctgacacataaaccctggaataattctgtgaaagcaggaacccttataatcaagtcctttctctccagtgctcagagcacgaaagttttgtgctgtctttgaaagcttgtctgcaaatatcctgaaggagacatggcccaagggcttgccactgacactgatgtcgaagaacacagtggggttgaccatggctggtagtatggggctcctggtggctgtggtgtctgccaactctgttaatttcttttttcttttctttttttttgagatggagtctcactctgttgcccaggctggagtgcagtggcacaatctcagcttactgcaaccaccgcctcctgggctcaagtgattctcctgcctcagcctcccgagtagctgagattataggcgcactccaccatacctagctaatttttgtattttctttttcttttcttttcttttttttgttttgagacggagtttcgctcttgttgcccaggctggagtacaatggcgtgatctcggctcaccacaatctccacctcccaggttcaagtgattctcctgcctcagccttcccgagtaactaggattacaggcatgcgttgccatgcctggctaattttgtatttttagtagagacagggtttctccatgttggtcaggctggtcttaaactcccgacttcaggtgatccacccgccttggcctcccaaagtgctgggattacaggcttgagccactgcacccggccaatttctgtattttcagtagagacagggttttgccatgttggccaggctggtcttgaactcctgacctcaggtgatccggccgcctcggcctcccaaagtgctgggattataggcatgagccaccgcgcccggccaactctgctaacttttaaggacccagaccacgtgtcacctcttttccctgattcccctgctggaagacatctcttgcatcagtatgttatctgtgaatctcttcaggcacttatgtttgttgaattaaaattatttgtgtttttccatttatacattcactcaaccattcaaccattaaaaatacactgagtatctattcaatcaacaattccttaaacattttttgtttctttttagggacggtgtctcactatgttgcccaggctaaactcagactcctggacccaagtgattctcttgcctcagcctcccagttagctaggactacaggcatacgccactatttctagcttgcatcaacaattcttgactgcaaactctgtgtagaaagaacccatactcagttccttttgtatctaccacagaacccgcaagcacgatgctcaaattgaatgtagaaggaaagcaggagataggaaactggcctgagagaagaatgccttccagggtgggtcatgaggggagaggactgaggagaggctagggaaggtgggacagcaccagcaaaggcacagaggtgggaatggcatggttacttctgtgaatgatacatcctacacagtttatagttttgctgaactgaagcttttggagagtggaatagtagaaaagtattcttcatggttaataatgggaaattactaatttactctggactaacaacagacccaaggttttggatgtgaaaagcattgaaagggaaatggaaatattgttcttctcatgcatgtgaggcaagcactttgctaaatattttgttaaaggctaaaggggatctagaacccagtaagaatcaagccttcactcaaggaagaggggcctccatgagggatgagtagggacttcacgggtggagaggggcagagaggtgccgttccacatgggtggaaatcgtcttaaccaaagaggaatcagccaagggtgttccattttgagaaaaagagaagaggaacactggaagaaaagtctgaaaagggaggtgttgacatctgtagaaagaccagattccaggctgaggatttcacgcacaatcataggagacccagtgaaagtttttgagcaggaaaatcacataaagcatcacagagccacttctatttcactaatggggaaaatgagattgccaggtatgacatcaaggtcccctgccaaactggcagagccagaaacaaacttagttttccaggatcctccaagtcatttctcgggaccaccattctcaaatatatacatttacacggtacatatttttgcagtgacttaccatttacttctaagtgcacttctgagctgtgaccagagctttctcttctgagagtctttcatagtatactggtgaataatttgtgttggatgaatgcagtatctttcatctgcagatcttaagaagccttaatgacaaccaagcttcattaattctattttgtgtatgaggcaactgactcacagaggggttcggcaattttctcattcaccctgggaattattaccagaaccatgaatgaaacttaggatgaaactctatttcataaaccattaaaccctgtaccctttatagtagaggagtttacaaagataatgacacctttgtattgcgagttcattcctttattctgttattaaatcctggcttgtgtggaacagaagcaactcactacaacaatgccagcctgcgttgcctggcagcgtgaagcgagatgggaaaagttgttacgtgtcttattggtgatggctggaccattcacagttcgttgttttcacccatccattccttaattcatttattcactccatgtgcatatatatgagtcctcattacatcacctgtaaaatgggcatagtaatattaccgtaagcaaaaggctgtttcaagaattaagataatctctataaagcgtgctgcctagcacatagttagtccttaaaataatagttataattaaaagagtaattacaaaagccacatggtcaaaagacaaaaatggtccttttccagcactagctatgggtggagagggtaaagttgcatctgaaaggtgaattaattcttgaggaagaggcagattcctcaaataaaaaactgaaacttgaggagatggatctcagagaaaagaaggaggcctggaccctcagtctgggtgaggaagcatcaggagggctaggaaggcattgctgggtagtggatgtcaaatagaccattgggaatgaagagacagagaaaagaaattcatatgaaacggagtggagtttctaagttctgcagagcaagctatgaacagttatggtgcaatccaagccttatccattgataggccagcctggttaaatgccctgtattttccgtgtttatttttccattgttcttccttactattgaacaaaagtttctgtccaagttcctgcctgtctcaactgtgctcaggacacactggggactctgttagaaaggagcagtcaaccctggcccgagtcgcgtggcaacaggagtcacagcaggagttcccttggagaccagcaagcccagggaacccccttccacagctaatttgggatgagctgagctgagaatattaggaaactgccatttcctcataacctgttgcaattccagtattctgtgtgacctaaaaactgggttggaaatcctccttaacacagatacagaacccagaagctgtagaggacaatatcaaccgatttgaccgcataacaggtaaaaaacaaaactgaatgacaagcaacagactggaaaaaaatcttcacaaactgtaacatattttaatatattctattataatataacaaaaaggaatatccaaaatacataaggagctcttataaataataaaaagagacaaaactaatggataaaagatataaacaggtaattgcagaagaaatagatagacaaaatgcctatcttcagtagtaattaagggaatacaagtcagaacaagatggcgttttttgcccattttattgacaacaattaaaaatataatattgaatactgggaaaggtgaagggacatgggcagtttcttctactcacgctgagaatgtaaacgggtagcgtctttttaaaggccaggttgaggcccggctctgtgactcacccctgtaatcccagcactttgggaggctgaggtgagtggatcgcttgagctcaggacttagagaacagcctgggcaacaaggcaaaatcctgtctctacaaaaaatacaaaaattagccaggcatggtgttgtgtgcttgcagttccagctactcaggaggctgaagtgggaggactgctggagccctagaggtggaggttgcagtgagccaagatctctcgtgccactgcactccagcctgaaggacagaatgtaaacctgcctccaataaataaataaataacaggttggcagcatctgtatttacagtatgcctaccctttgttatgacaattccacttttaggaatctatactattcaaatatgaggatacgaggatgtcaatggatcattttaacagtgagaaaatattaataatatctagcattgattgagggccagcacatttctaagcactttataacaaatattgtgaggaccccgagacacagaggagttaggtaacttgctcagggtcacatggcaagtgtgtgtttggggcaggattttggcaattgtttcttaaccactatgctctcgaatagagaataattacagtgtggcacatccaaactggggagtagaggacagcaggtaagcggaatgaagcagatctctgcctatagacatggacacgcctctaggacatattagtaatgaagggaaaaaaccaagttgccaaacaccatgatatggtataatttcatgtctgtggggaaaaggtaacatgtatctataatacatatgtatgagaatggccaaaggccttgagtgatataagaatgtatgtggaaatatagtcagaacagtaaattttagattatgttccatatatttctggttcgtttgaacttttacaagaatgcatttgtgcattacttttgaaaacaagaattgttgtactaacctcctccttacccttaccccatcctgcaaaaaggtttaactcatatcaacagattcattttctcttcttccaggtagacaatgggataggtcttgggtaaaaatcttctgtaccatggctttttctggtctatataaataagtatatgtagaacatgcccaggatatatatcttgttgatcactactcttaaaataaggttttcatgttcggtatttggaccatggcttcctgttattccaccaagctacatacaaatatacaaccagtcaaaattaatttggaaactgagaaccacagtgtttttttttttttttttttgagacaatctcactctgttgcccaggctggagtgcagcggtgtgatcacagctcactgcagccttggcctcctgggctcaatggaggaggcctccaactcagcctcagggggagctgggactacaggcacaggccaccacgccccgctagacagagtgctccttttgccttgcatattattttgtcatcagaaaaataatccataatcatagattatctcattattttgctccaatgcataagtgggagtgtctagctccctctgttctcctggtggcctctgtggaggtctgaatgagtagctcaatacacagacttaaaggactctctggatgtgaagtcagtgttactatctgaaagggaaaagctgcattggatggatcatcggggcctcttcctgcatgagtccagctaggggtggttttaactaacctaaaaccaaagaagaggctccaactaatccaatggtttggatcaaaatgcaacttttacagggctggggcttcaccctatcttcgggtttatctctgacatgccagggagacagttcttaacattcttattacttaatggatatcagattgttgcttttcggagtggtttttccattttttgaaatttaatttgttcttaagtatctttacagaaaaaaatcccatttatttaagaagtactgtattctctggttcttatagctgctcattttacatagttttagtgtgtacaaacgattttttttgtttcatttatttctaatataccttctcatgtacttgccaaaatttcatgtttgacacagtctgcatacctgccaggattcttgctgttaatgtgaaggcgcctgtttgggttactcaattgttggacaactgggcccattcccaggttttggtcatcacgaacattgtgaatagccctgctgttaacatctttctgcaagttctcccccttcttcgccctttggatcatttccttggaaatgtacttccttaaatgggtttactgggtcaaaggggctctatgaacggttttatagctcttggcacataattttcggattgcgccctgggcggatctaagcgatggcaccggccgccgagagggcaggaatgcggcggaacggtcccgataaccacccctcttccgccccccaaaaggagaagacctcgcgaaggcctgcggctggaaagcctttttccggtgctctcccgttctcttgaagtggttagtgtctaagccgggcagaaacgctttcaggatcccaggccctcctgccccaggactaggattccacccgcctccgctaattcggaatcccagacacccagggccccctctcaggctcgcctcgaaacccccggccctgcggcccctcgcgggcgccgagctcggtcgctattatttgggcgcgggtgaggcgaggcccgcatagctgcgcgctgagtcagcgggggccgcggcggggggcgcggccgggctcccccccagcgcacggtgcgctgggcccggcgtactggggttaccgcctcggggccgcggggnnnnnnnnnnnnnnnnnnnnnnnnnnnnnnnnnnnnnnnnnnnnnnnnnnnnnnnnnnnnnnnnnnnnnnnnnnnnnnnnnnnnnnnnnnnnnnnnnnnnnnnnnnnnnnnnnnnnnnnnnnnnnnnnnnnnnnnnnnnnnnnnnnnnnnnnnnnnnnnnnnnnnnnnnnnnnnnnnnnnnnnnnnnnnnnnnnnnnnnnnnnnnnnnnnnnnnnnnnnnnnnnnnnnnnnnnnnnnnnnnnnnnnnnnnnnnnnnnnnnnnnnnnnnnnnnnnnnnnnnnnnnnnnnnnnnnnnnnnnnnnnnnnnnnnnnnnnnnnnnnnnnnnnnnnnnnnnnnnnnnnnnnnnnnnnnnnnnnnnnnnnnnnnnnnnnnnnnnnnnnnnnnnnnnnnnnnnnnnnnnnnnnnnnnnnnnnnnnnnnnnnnnnnnnnnnnnnnnnnnnnnnnnnnnnnnnnnnnnnnnnnnnnnnnnnnnnnnnnnnnnnnnnnnnnnnnnnnnnnnnnnnnnnnnnnnnnnnnnnnnnnnnnnnnnnnnnnnnnnnnnnnnnnnnnnnnnnnnnnnnnnnnnnnnnnnnnnnnnnnnnnnnnnnnnnnnnnnnnnnnnnnnnnnnnnnnnnnnnnnnnnnnnnnnnnnnnnnnnnnnnnnnnnnnnnnnnnnnnnnnnnnnnnnnnnnnnnnnnnnnnnnnnnnnnnnnnnnnnnnnnnnnnnnnnnnnnnnnnnnnnnnnnnnnnnnnnnnnnnnnnnnnnnnnnnnnnnnnnnnnnnnnnnnnnnnnnnnnnnnnnnnnnnnnnnnnnnnnnnccgggctgggccgggcgggcccctgggagcagcccccaggcgggggaccgccttggagacccgaagccggagctagaggcaggcggtgggcccgggtggagtcccggccggagctggtggttcgggggcggtgctaggccccgaggctgcgggacctgagcgcgaggagcctgagtgcgggtccagcggtggcggcatgagccggcccccgccgacggggaaaatgcccggcgcccccgagaccgcgccgggggacggggcaggcgcgagccgccagaggaagctggaggcgctgatccgagaccctcgctcccccatcaacgtggagagcttgctggtaggtggccggggcctgggagcttgctcgttgcagctcacacctcagatcccctctccgcccagccctccgtgcccgtccgcccgtggggagggggaggtcttgccccaccccgccctgcttccggcagccggggccggagaccaaacgattctgtcaccgagttccaagagtagtgacccgcctttgattcctccctctacctcctgctggagccagtgtcatccccggctgctcctttcttgcagcactgggaggaaaacacccctcttctccttccgcctgcccactctggggaggtgggtggaggactggccatgcttcatacaccaggttagctgatttgaaagtgtcatgctacgtggggacttggtgcgagcgagggagaaagaaacctgatgctgtccctgttgcgagtactcactggggtacatgacaaagagccgccctcactctctccttttagtctgaaatcttggaacacacagctaaagttttgctgttttcacttgcgtttgagcattccatacttgctatttagtgcattttaattgctgtaaatttaattccctgagattattgcgccagagccaaaaaatcagtctgaattgtggagtggaataaatctgccctcttcattgcgtctctttcctataacgacctttgaaatccagattaatagcaccgtaaaggctgctaattggctcttggttaagaaaggagcatgttttacaaaatagaaatgcaccgtagaatgctggcttatttcttatttttgttaggatagatgattgtatttcgcaatttgagtagtgtgcagtgtagatgcatttatgggaaaagggggtgtggacttttaccctggggaggggaagaaaggtgaaaacgatactctgtgtattaaattgactctggaagactagaactagggtgggaggtccttagatccgttagacattctgtgctggaatgcagatgtttagttctattccctcctggaataaaccttactgtatgatgagaaaaactgcctcctccctttccagggacggacggactggcttttggtcagaggcggttggttatcctttgaggtttcaggcatcgtttgcagagtgactcagtcctgtttggtcaaaatgcaggaactgactttagctatatagtgtctttctgcacagtgtacagaaagtaatgaatgatgtgctatattgtgtcacatgtgtttgatgttttactgtttttcgggttaatgtgttgttcctatgttttaatgggagcagtctttgaaagtctttaatcgggagtaagattgcttgcatggatggcatagcttttcctaggctaaagcggagactctgggctgcactcccagcattttcactttggtattttgctagcaaaactttgacctaaggccagaaagtttagttaaaaatagtacagcaaatctcaagtattcatcaggttcatgctaaatcctagatggaaacgttttgcaattcactttgatatcttagatctttaatgatattaatcataattattagagttattctgagcttgaatgtaagtagcttatacatgtaatatgatcatgcattttgttttattgctttccaaattattaaaatggaggctatttttaaaagtgaaacatctcacatgttcaggacacagttcattcatttagcagttattacagccaaaacacacttttattaaggtggcacattacggatctgagaattgacatcaggtgctgatgacttgacagactctgttattgctgtttctagttggttaaatatgcttgaggtgcagtaaacctttccaagccaaaatgcgtcccttattcctttggagcaaggttcctggtgtttctgttacaaattgataaacgaaatttaaaaatttttttataattaattaattttaaattacgcgtattttatttatgaactactagaatggattttttattgtggtagcgtatacagaatttaccatttttaaccatttttaagtgtacaggttagtggcaggcattaaatacattcacattgttgtgcagccatcaccactatccgtctctggaatcttttcatttttccaaactgaaactgtaaattaatgtttaaaagaatgttataaaaattatatttcctgaaatactgacgaaataatggctggtatcactttaaagatctgaaaccttagcatttaggttgcatttcactattggtcattgttttactgcctatgacatttattttttggttttgccatgggaaatacatattttgtctttaacagaaaatttaaaggaatataatttaaagcaaacacagctgcgacactacattcaggagctcagaaagtaccattaaaaatagtatatacctaagatgacaaaagaagatgaagtacaccagaaatgattgtatgatgctttcagtgggctaggcctagaaggtaaaactctgtaggaaacaaagttttatgagataacgtgtaaagtgcttagcctagtgcttggtacatcacagtgctcattaaatttagttcacttctcctgtgcacacttagcatgttattagttaactgctttaaattttcttttcaaaggaaaatggttttatttgcaactatttcttgctacataattttgagtgagtagcattatcatttgaatttgtcatcagaaaagtgctagcaatcattaggcataggtagagctggattccaagactaaatcagtgtaaagatgacatcttgtttctctgcaaaggctcatggctttatgtgggtccttaaattaatctgagaagagtatatctcttttatggttgcagattgtgagccgcttagtattacttagagttttgcttctctactgcctcttttttttttggaggcgagtcttcagtaatatgcttttgtagtgtttgaaacctttgggtaaatacctatgctttgttgtcaagaccagcttctcatactgcttacctattatggtaaaaagaactgtgtttcaggctttgctgaagagatatttttctaaaggtctgtgctttttgagtgttgatttattttactctttcaaagagtaaacagtcacaataacctgtaggactcacgcttgggtaaactcttacttaagacttgtgtggatgggcaaaggtgattaaaactttgtttacaattttcagtggcataaaacataaaataatttgattgatttcattatacttgtaaactatctgacaatattatctcagtgcttagactctttcagcatgctgctggttatttgcctagttaaaataaaattgtatgtgtatttttcccatcatgtaataagtaagaacattataaagatacaataaaaatgaaatagaataaaaattaaaaatcattttatacatttttttctttatgaagagtttggcatttatagtgtaaaatttgtgactagtttactttaaaactttcatgttgataggagatatttaaagaaaatgagttagctagggaggttttaaaaaaaaggtgatgtgtggaacttactgttgatgtgaagcaagtgcaggtccgcaatcccttatccacaattttgatatataaaaaacccagtttttggtaaaatgtatttgatgataacatctgacctaatctcacattagaatacttgtggtctagtcattcctcttgatgtaaataataatgccttttgctggaggaatatgaatgtatttgatttcagggtgttgcccagattttcaagagcatttttgggagtacacagtatatgtactgtgtacctttctaaaatccaagaaattctgagttcggaaacattttggtcccagggtaaggccaatgtagactaagtaaggaaatacggacttacatacacttcagtagctgtaaataaatagtggataattatcttgaaacctaacttttttgttttttatttcccaagtcttgatcagatagccctctttttcccattttgaattctaaaaatatagtatgcaaatataagttacgaagcgtaaaaacatattcatgaaatcaccacacaagttaataagtggaacactagcctgtagaagttacctgtgtgccgtcgccgctgctggattcagtcttcctgcatcctctctcatctgctaccctgaacattttattgttcctttgcttcatttcatagattactacatttgtgtgtatctctaaacaatattgtttagttttacttgtttttttaactttataaaatgtcagcatttttatgtattcttttatgacttgctttatttactgaaaatggtgtttctaagattcactaacattgtgggttattcatattctctgctatgataatcagtatagctccgatctacttaatggatatttacagttttctttctttctttttttttgtttttttttttctgttatggaaagtgttgctaggagcatttctggagctcacgtgaataattcctgtagattagggtatatatctgggagtggaattgctggattttaagatatactatgttcagtcaacttaatataatggatagagttgaaaattttccccatgatgttattatagaaaatttcgaagtatagtaagggtgaaaaaatcgacagtgaacatccatatatttaccgcataattaatattttgctgtatttgctgtattttctttatctgtccattcctttatccatctatcaatacatcttttatttttggttcacttaaagtaaattggagatattagtatacttcaccttcaaacacttcagtatgtatttaattaagaagagttcaatatttgtttagattttttaaagattaaatttgcatgcaatgaaatgcacagatctgaagtgtaccgctggtgagttttgacaaatgcacacacctatttaatgcaaattcttgtaaaaatacagaccattattaccaactcagaaatctccttcacaccttttcagctaatttcacacaccattttcttctattagaggcagtcattcttctgatttttttttttttttgcagtaaagattactttgacttcttctatacttcataaaaatggaatcatatagtatatacttttctgtgtctggcttctttaatttagcattgtttctgagagttatctgtgttattgtgtgtgtcagcagtttattcctttttctcattgttgaattgtcttctgttatatgtataaactgcagtttgcttggatatctcgtgttgatgcatacctggactagttttcagttttttgttttcagaatgtacactggtcccttggtgttctccggggattggttccaggatacttgccttatagtctgcctacgtaccaaaatccgacgacgcacagtcctttttataaaatggcattagtatttgcatgtaatctgtgcatatcctccatatactttaagtcatctctagattacttacaatgcctaatacgatactgtattgttttagtttgtattttttaatttttattttttttccaaattatttttgatccacggttggattcatggatacagagtgctgagtgtattatatattttggcttgatttttttaaaatatggagacaagatcttgctctcttgctcaggctgggatgcagtggtgtagtcatagcgcactataaccttcaactcctggtctcaatgatccttccaacttagcccctctagtagggactacaggcctgtgccactgtaattggctaatttttattttattttatttttgcagaaatggggtcttgctgtgttgtccaggctggtctcaaactcctggcctcaagtgatcctccagcctcagcccctgaaaacgtnnnnnnnnnnnnnnnnnnnnnnnnntgctaactcatagggcagctatgtgtttactttttaagtaaactgatggccaggcatggtggctcatgcctgtaatctcaacactttgggcaggctgaggtgggtggatcatttgaggtcaagagttcgagaccagcctgatcaacatggtgaaaccccatctctactaaaaattaaaagaaaaaaaaaattagccaggcgtggtggcacgcacctgtaatcccagctgcttgggaggctgaggcaagagaatcacctgaacccaggaggtgggaggttgcagtgagctgagactgggtcattgcactccagcctgggcaacaagagtgagactctgtctcaaaaaaaaaaaaagaaactgccagatctttttatgaagtagttataccattttatactcccaccaacagtatatgagagttccagttgctccacatcttccccgacactgctctttaaaatgtgatttcgatttgcatgatttgcatttccctcatgatgaatgatgtactttttcttgcacttacgggccatttatatattttcctttgtgaagcatctgtttgaagcaacatacctccatttttgcccattaaaaaacattgggtcatttatttgtatttattattgaatcttagaagttcttttgtatataaagagaacactctttgtcaaataaatgttttgtgaatgttttttcctagcttatggtgtatctctctctctgtctctttttttttttttctgaggtagagtcttgctgagttgcccaggctggagtgcagtggcacaatctcggttcactgtaacctccacctcatgggtttaagtgattctccctcctcagcctcctgattagttaggattacaggcatgcaccaccacacccggctaattattgtatttttatagtagagacagggtttcaccatgttggccaggctggtctccaactcctgacctcaagtgatccacccgccttggcctcccaaagtgctgggattacaggcacaagccgccatgcctggccccatatctctttttttaataaaaatttttaatggttgttgcttttctgcccaagtaattgtcgccatcctcatgtcgtgaagatattctcctttgcttttttccaaaagctttatggttgacttttacatttaggtctaggatacattttaagctaaatttaatgtgtggtgtgagttaggggttgaagttaattttttttctccacataattatccagttatccagactatcctgcaccattttaaaaaaattaagttttctcattggattgctttggcacctttgttaaaagtcagtttactgacagttggacttttaaatttgcttttctaccaccttagtagctacaccggatcatcagtcctggttctattgtttaacccatgctcaattcaagtcatttcttggctgggcacagtggttcatgcctgtaataccagtgctttgggaggctgagttgggaggattgcttgaggctagaagtttgagaccagcctgggcaacatggtgagatttgtcgcctctacagaaataaaaaaattagccaggcatggtggcacaaacttgtgatcctagctgcccaggaggctgaggcaggaggatggcttgagtccaggagtttgagactgagtgagctgtgatggtgctgctgcactttagcctgggtgatagaatgagaccctgtctctggaaaaaaagtcatttctttttagttttatctgtacctgagggaagtgacaaccaactatggctgagagggaaacatagattttattttttaaagtgaagaaagatttgtcattttttaaattataaaaataatatgctctcgttgtagaaaatttagggagcatagaagggtataaatgctaatagcacttatctacaatctccttccttagagataatcactgtttaaattaacattttggtttatatatcttaacttatatgtatttaaaaattacagtattcatgtgctttatctttttaaatatttaatgaatagtatgagttttatatagtcacaattatcaatcgtttcactgtaaagtgatttctggcttagtggtcatgtttaggaaattctctgttaccaggattatatcatcatatacctgactttttgttctcacatggctttatttttattgatattttcatttcatttggaattctgatggaaagtatgaagtaggagttcaaagattatatcaggagattgagatttgtctaggtattaaatttcccaaaatattaattgggagtttctgtttacatctctttattatactttctatttggagagtggtgattggggtgagaaaaaaggtttaatgattaaggtctaatgattataggttaggtctctatttgggcctcttgaatttcttcatgaaaatactatacaactatacttaaaactctaatttgttagtgataaggattactggtggagagaatgtggatgactcagtgcaacttacagcttttaaaaataataaaagaacattttcccttggtggactagcatatggagcttactgtttaataaattgatgtgaaatcatggtgcatttggggctcaactaaaactatactcactttatccttaattggagtcatttttctttcctctcatctgtactcctgcccccctttaaagtattattaaattatatagatattcttgtaaattctgcagttaggttttctaaatgaccctcacatatcttttcaaaaagcatttgggtcacaatacttagcatttctctcattccccgccttccccttccgtgtgtgtgtctgtgtctgtgtgtgtgtgtgtgtgtgtgtgtgtgtgtgtgtatcagtcaaagggaactatttggattcatttttagttcattgtcaataatattttggggaatgtttctaagtccaggaatgattttatggtttggtacttcattttggtaaggtatgggctgtttgttcagatatctaaagtgctttataatttttttttgtcataggtgattgaccacttatattcaatgtctgaattcctttattctctaaaagagtttcacctcagatttctttagttataaagcaagtgatagacattttattttcaagggattatagacttggaacaatttctaatgtttaattattgaggtttctatgccatggaaatgaattagcgaagtgttctctagcagtactttatttagatagaaacgcgccagagcagggctggtattgtcttaattacctgcatgattgtgttgacaaatgcttaatatgctaagcattgccttcatatatgcttcttggcttttgagtttatttttatttaatgcacagaatatgagctcttttagtacgagtcttttatgttttcctattctgtaaatatttgttgaatgaactaacaatttttttttttttttttttttttgagacagagtctctctctgtcgcccagcctggagtgcagtggcacaatctcggctcaccgcaatctctgcctcccgggttcaagggattcccctgcctctgcctcccgagtagctgggactacaggtgtgcaccaccacgcctggctaattttttgtgttttagtagagatgaggtttcaccatgttggccaggatggtctcaaactcctgaccttgtgatccgcccaccttggcctcccaaagtgctgggattacaggctcaagtcactgcgcctggcctctttttttaaataacaggagtgataacctgtagaaatatctctacttgaagagtcattaattaaaatacttcccagataaacattttgatatgtgttcctgtcactaagttcttatctatccataggaaagaagataagtaaacatctatatatgcagggaggatgggtttagaagtagaattaatttggagatcatgtaggaaaagcaaattgtgatttggatattttccggattgttgtgaaacagtttgtcttggaaagaattaggtgaattttattcagtgttttaggtgaagtaaagatacctcatgggggctgaacagctttttattatttatatgtgtcattttttcccccttctccttaacttttttctggttaaacacatttacttctttttatgtacctagttatgcctgtgttggaattgcactttatgagcagggcagatgaaatgctggtggtgtgttcacaaggtgaaatcctttaaaatagtgtattggctgttattaatagtaaggcaatatttttcaatagtactaaaaattaagttaaagggcatgagatttttttgacaggaatcaagtgtgtcattgcaagtcacgatgacttgagaatttgtcaggtattaagcattctggtttctcatgtgttgatttggctttaaactgtttcatgtttgtagtatttctttttttttcctaatacatgcaggtgctttttttgtgtgttctctggaccatatttaaaacagttacagaaagaatggaatttagagctgtgatagtttttcttctatatctactagtggtattcatttagcagacaaagaagagtgatacatagtatcttacttgtaataagcctttcatattggttgaacaaataaatacagccagcagatgtagtgcaattggcaaaatgtgtttcagtctcttattagctcttagaatcagctctgaaataaaagtctggtggttgagaatgagcaggtattgaatatatagagtcaggcatcattgtttactagcattgctagttctttttattttcaactgttttattgaggtataatttatacaccattaatgtcttccattgtaagtgtacaatataatgatttttagtaaatttacaaatttgtgtaaccatcatcacaattcattttcatcaccccccctaaattcccttgatcttatttgcagtcaatcctgaatcccatccccagccaaccactgatctgctttctgtctctataagtttgtctgttctgtaaattccatataagtggaatcataaaatatgcagtgatttctacctggcttcttttacctaacgtaatgtttttgacattcatctgtgttgcagcatgaatactatgttctttttaattgatgaataatattccatggttatggatataccacattttgtttatgaattcaccatatgtgagggcatatgttttcatttctcttggacagattccaaggagtgggactgcagggtcatatggtaaatttatgcttaacttttgagaaactgcagactgttttctgaagtagccctaccattttacattctcactagaaatgtataagggttccagtttctccatattatcacaaaacacttggtagtgtgtgtcattgtaattatagccattgtagtgcattttaccaatgacaaatgatgttggccactgttttatgtgcgtgttttgcttgttcttttgatttttgctaatgtgtcatgagtgtggcctaatttggatcattatatttaagttgtttttgtttttatgctaggaaataatacggtaatcaactggtgaaggagttttattttgtataccacaggccaattccagtgtttggaattccaaaaatagaatacaaatacagatcagtgccctctgaatgtggaattatcctactgataagtgtttatacctgaaaggcctagttaatactaagcatttttttaaaaccttgttatgatactttttgtttccaaggaatgaatgagtcttgctgatctgtgtaggctcttttttatttttttaattaaaaaaaggttttttttttaagagatggggtctcactctgttgtccatgctggagcgcagtgtgatcatagctcactgcagcctagaactcctggactcaagcagtcctcctacctcagcctcccaagtagctgggactacaggcgcatgccactgcacctggctaatgggaaggccctaataatggcagtggagtctactagttgggttatttctgtttctgttgttgttgttgttgagacagtctcacactgtcgcctgggctggagtgcagcagtgtgatctcagctcactgcaacttccgcctcccaggttcacgtgagtctcctgcctcagcctcccgagtagctggaattacaggcgcctgccaccaggcctggctaattttttgtatttttagcagagacagggtttcactatgttggccaggctggtctcaaactcctgacctcgtgatccacccgccttggcctcccaaagtgctgggattacaggcgtgagccaccgcgcctggctaattgggttatttctgagctacagatgttaagggcttctgacgtgcacatgactttttttttttgttccattctgctctgtgttcatcttccatcttttgattgttttgaacatgttaggtataagcttataaacttatttctttcccttttgttgacccaaattttatctttatacttctctgttaaaacagttactagtattacttcaataacttggttcatatagaggataggtagctgttggtgttttaagtactattgcacttggcttttggcttgtttttgagtattcattttaatttgccttacagatacaaaggttgcctgttcttgttcacaggtggcacaggtgccatgttcttgttcacaggtgtatcagtgtgtgattctactcttttgctttgtatttaggtgtgaatcctctagaagtcatactcagaatatgcttattgaaattgaagttttctttttaatgttaggttagataaactattttgagtttttattaaagataactacatgtggtacctttttcttttttcttgagtagcaaaggaaacttagaaaatattatttcttcttcttctcctcctcctcctccctcctcctccctcctcctccctccttctttctgctccttcctccctcctcctctttccttctcctccccctcctcctccctcctccctcctccctccccccttcctccctcctcctctcctcctccctcctcctctctcttcctcctccctcctcctcattcctcttcctccctcctcctccctcttcctccccctcctcctccctcttcctccccctcctcctccccttcctcctctctcctccctcctctctcctcctcttccctccctcctcctcctccctcctcctcctccctcctccctcctcatcttccctcctcccttgtcttcctccttcctcccccttctcctttttttgagacttttttgagacgcagtctctgtcacccaggctagagtacagtggtgagatatcggctcactgcagcctccgcttcttgggttcttaaaagtttttcgttttaaaaccaaaaggaaaagaaagtgtattagcacagttgtcatgagctttgatgcctacaagatctagtgaaaaatgtgtttttgtatgttgaaatccctgtaaaagtattttgtatattaaatatgaaaatattagtatgattttgaaaaatgtatcacctttttcagataactttgttgttttagagttatagtttgtgggatttttatctcatggctaacaaaactacataccctgtggccaaggcacaattcaataacgtggggctctagagtgacatataataaaagtatctttaaagccctaaagatttatgacattttatcttttgaaatattgttttcaaataattgctgaatagaaagataattagaaatgtgaaatctgaaactaggtgatgcttctttcactgactgaatatatttctgcagttatttttagaagagtgttatggatgatttagaaacatttttattggaagtatttttccagttagaaacattttacaatctggtgatgagaattcctaattccataatacctcagtgttgtacaagatgctccagcatttctaaatatttgaaaaaaatgcaattaatttgagacttcatgagtcagttatgacatgttcatgctaaaaatattctcaggcattatttcttgctgtagcttaaacggaatatgcaactcatggttgcaacatttaaaattagaatatggataatgtttatgttgttatattcaggttaaagaagaatttaatcacaaaagcaagagaacatttaaagaatttaatcacaaaaacgagaaaacgcacctaaaggattttgctgatagttttgtaaaacaatttctgctgcaagcaatttttttttttttgtaaaaatggggaggctgtaaagttataaattttgaatgctggaaaacagattgttttccatatttaagacatttccataataggagaacagcagatgatacaaataaaactaaatttagaactaataaaaggaaactctagtacaaaattggcttgtaaaattttcttctgagggaagtcataaaatataacagtgaataaatttttaagaagttacggttttttttttttttggagatgggattgttacaagcttttagtatagggaagttttgtctttctggatgatataatgtaaatatttggtgtagtgttttaatgtgctttccccttcttttaaacagaactactcagtttgactctagttacaacagatctgtgaaataaaagtttaaaaatctgaacaatgccttatttcaaatgattttctattaataaaattccaccaaagtacataaagaggatccctgtttgatctcattaacatatgaaggttaaaatgaatttttttcttaagagtttccccaccaaggtagtgaagatgggcaaaaaatgaaggaaaatgacttgaatttttaatttcaagtgtattttttttttgtttcttttttttgcatttttaaaaaaattattattatactttaagttttagggtacatgtgcacaatgtgcaggttagttacatatgtatacatgtgccatgctggtgtgctgcacccattaactcgtcatttagcattaggtatatctcctaatgctatccctcccccctcccctcaccccacaacagtccccagagtgtgatgttccccttcctgtgtccatgtgttctcattgttcagttcccatctatgagtgagaacatgtggtgtttggttttttgtccttgcgatagtttactgagaatgatgatttccaatttcatccatgtctgtacaaaggacatgagctcatcattttttatggctgcatagtattccatggtgtatatgtgccacattttcttaatccagtctgtcattgttggacatttgggttggttccaagtctttgctgttgtgaatagtttcaagtgtatttttaaaagagagagtagtatagtggaaagaacattggatttggagtcagaaaagctaagactggtgttaattaatgagatgttctagtgattatcttcttgattgtgagtaatttataggactatttgccttcaaggagttgtgaagaatacagtgagaagctaactatatgtgctagtgttctgtaaactgtacagaactttagcttttttacagacagttgaaaaactatgtgtataacagcctatattgtttgtgtctctcaatgtatgtgcatacaaaatcaaccctctgatattagcctgtttccccccccaaatgtagcatattatttggcacatattagcttcactaagtgttaaataaatgaatgaaaattgttggcatttttgtgttcttaattcactgcgtgtaattagtcgcattggggttttggatggatctttacaatctaagagaatagtaagacaaagtcttggtggggtttatggctcatagatgatggactttggggatagaagtttcatatcagagatgtggaagggaagagagtgagcaggaccagggatagaggcagtcttcttttcactgataatctgaatataccatgttctctatactctttgcccttgtgtgtacctggattgctctgtctccttctctgttttgtcagcttatcacaaaaacaaaaacaaaataaaacaaacttcattttttaaattacaaaagtaacatatgcccctttaaaaacggacagttggccgggcttggtggctcacacctctaatcccagtgctttgggaggccaaggtgggcagatagcttgagcccaggagttggagaccagcctgggcaacacagtgaaaccctgtctctacaaaaaatacaaaaattagccaagtgtggtggtgtgcacctgtagtcccagcttcttgagagtctgaggtggaaggattgcttgagctggggaggtggaggtttcagtgagctgagattataccattgcactctagcctgggtgacagaatgagactccccctctgcctctttcttggccatgttctctttctcattgaagacacaggcatgtggctcacaatctttccccataaggctttgccaccattcgtggtgaatttagagtttatgtgaacagagggcccaggactctggctttatagtttcccaatttcatcatctccagttgtctttcttttcgcttaattcattcacttaatcccatggagctactctggacctcaccattacctgaaaattggctttacctttgaggtcttaaatttaaaacactgtcctggctctgactgtaaacttttgagatctgtagttccttgacatctctaaatggttcctttactagcaggcaggaacccattttccatcactttaaacttcttgccagaatcctcagtgtccttgtcctcatgaattttcatcgtatgtatctggcaaaacctaagttctggatcagtttgtctctttggccaacaaaaaaagcatttgttgagcagtgatggataaaaatcacacacaattacccagattagtggtactgcaaattcatggtctctagtccctgaaagagctgtcagggctgcattgcaattcttttattctccataggggctattttaatcattcttttctttctttaaacttaagaaagaaagtatcctccccggatggtctccccccttcatgggaaaacagaacccatgaaaaggagaccccttatatttcctgttacttgactcaccagtttatctcctccgtagcatttgttcttcctttccttcaatttcagtggatgagatgtttcctcatgctgcctcaggctgattctccaactgtgctctgggtcttattcttttcttcctgctgattaacgctatgtctttaatctctctcttaattctgattatttcccatctcactaataaacatgttcataaaacaaccaaaatacccctagacataagtctcatttcttactgcatgatatggtcagaaaataaaaaacaaaacaaaaacgaaacctcagttctttctagcttctgcctcctcctctcaccagcaaaacaaagccccaagcttgtgtacttctctgttgtctcatgttctgttcacttctccatacactataatgtcttctctcatcattcactaaaactgctcgctccaagatcatctggacttcttgctgctaaaaccatcatcttatagaatgttcaaaagtacttgacacttgtcaaattgctgtcttctgttggcttctatgacagtacgcaaagcctcagctgtttctccttaggctcctttgctgccttctcttcttctgccaaatggaaatgttccttaacttttttttttttaaatgcatttgccatcttggttttgtatcttttccaggactttatcatttgtatgttgatgccttccattttatccatctgagagcttgcatttgagcttctggctcacatatccagctacctactgggcatctctacttggatgtactgcagatacttaatgataacatatctacaactacattcttttttcccctattgctccaaatctgcttcatttcctttggttttagattcagtgattgtttccactatccatttagcttggatcaggccaaaaatctagtgtctgttatctttgacctcacattgttcccagatcttatcagcgttacctcttaaaggggattcacttgcctcgcatatccctgcttctttcctatttcaagtgactatcatgctatttctagattattatggtattcttttccctggtgttctttcccccagcttttctagtcttttatccattttctactctccagccagactaattatgaaatgtaaacttaccctgttattctctgaagtatttaaatgattgatttcccattcattcagagaaaagttaaaattgctaattatttcccacaaaattgtttgtgatctaacttctgctgacttctctaacctatcgcttgtcccttactcctccctttctctcatatcccaccccatattaaataactttcatttgaagctgcaccatttttcttcccatcttcaagttattaaaaaaacctagatccctctgcttaaaatacaaatgccaactccccaaatattaactgtaatgtagtatgtggaaaaacttctgtagcattgtatttagtttggtatgaagttggattctggaaggacaagacaaatatgtacagttttccctcagtatccaagggggattggttccaagaccccaagacccctgtggataccaaaatctgtgcatgcaccagtcccacagttggccctgccagaaccacatacacaaaaagtagccttgcctttggtagtggatgtgcaactcacggataaggagaactgactgtacttattggaaaaaaaatctacttataaacagacttgtgcagttcaaacccatgttaagggtcagctgtatttataataatgtctttcagaaactgatctatttctgtgttaaatgataatggagaattggtttgtatagcatgaaggggatttccttagaaaagtgtttcaagtggaagttgctgatggaaactcgtgcttcttgtgagcatttctattatgagaagtatggataaaatagttggctaatggaaaaatggtaatataaatgctgggcataaaacttctttatagaaaacgaatagatattttaaataataagcacttgagacctgtcatgttgaatagaggtttttatgatgtactattacggttattgtcatagcagaaataatacaagcaagacatacatctcttactatgtgccaggcactgtgctttactaacttgttagatttctgtgtcatttttccagtgccatgaaaataacaagttctttcaagattggcttcttttacttagcaatatgcattttaagttttccctccatatcttttcatggcttgatagctcatttctttttagtgctgaataatattccattgtctggatgtaccatactgtacccactcacccactgaacaacattttgttgcttccaaattttgctaattatgtataaagctgctataaatgtttgtgtgcaggtttttgtgtgaacataagtttgttttgttttgttttgttttgttttgttttttgagacggagtctccctctgtcgccacgctgcagtgcagtggcatgatctcggctcactgcaacctccgcctcctgggttcaagtgattctcctgcctcagcttccccagtacaggcactcaccaccatgcccagctaatttttgtatttttagtggagacggggtttcaccatgttggccaggatggtcttgatctcttgacctcgtgatcctccagccttggcgtcccaaagtgctgggattacaggcgtgagccaccgtgcccggctgaacataagtttttaactccttcaggtaaataccaaggagtgcaattgctggactgtatggtaagagtgtgattccagctgtatgacgttctggacaaaggcaagagtaaggaaccagcaaaaagatcagtgactgttagtgtggaaggagagatgaataggtggaggacagaagattcttagggcagtgaaaacactatatatgatactataatggtggatacaggttattatacatttgtgtgaacccatgggatgtgcagtaccaagaatgaatactgacggtaactatagactttgggggataatgatgtgtcagtgttgtaggtttgttagttgtaacaaacgtatcattctggtgagggatgttgatagtgggggaaggctatgtgtatgcaggggtgaggggtatgtgggacatctctgtacctttcagttttgatgtgaacctctaactgctctttaaataaagtcttttaaaaaacatgttctttaaaaatattctgcacttaggaatacttacgaattcaaatatggtttaaaatttttctaaaaaattatgacctcttctgggtagtatagaggtagttgcgtactttttgcaaacataatgagaaacctcttacctgtctgattaaagttatattaaagtcagaacatctgagtagcatatatgtctaatagtatgtaatttcacccaattctttgaataaaggtttattcattctgtacctgagagatttagtgtcttttagatttaatgtcttcctgagtatttgttttctcatttaatacaattgtgaaatatgtagggcagatatacagaatagaggggaaactgaggtttggaggtttgtccaaagtcatgcagctgctaagtggcagaactggaaaagtatcaatgtctgtagatttctaagacagtattctttttttcattatgatgcttattttctgaagtaaaacctcaagctctgaacaagaaattggttagctatttggacaagctggatggctatcttagaaaagtaattaataatattaaatgttttaacattaaaaggattacaaacttcagaatatttgttgtcagtgattgttcaacttgtttaccctaaaaaatccccttaggttcaggttaatcttcttcactcttcaaaagagcactgctttggattttttcatgtctgcaagtgaagagagcgtttcactgtatgatctatacttactggagataatgattaagaacttatctttaaaactcattagttgttagtgtgattttgttcactgaccatttgaccaagctagggaggaaatggaacgcgtaactcaggaaagggtaaagaagctcttcacaactgtggtatcccataatgataaaattagccaaaaccaaaaagtacatatttttaactttctaccacatataaaataatgtttaagacatagtccaggtacttttaagaagttatagtttgggaagataaagcttattgtcaagtggaaagttaaatgatgaattaaagagctataaatagagtagtataaaatgataccttacttgctatttgagcagcagataacaaacaccctgaattaagaatggtggcagtcaccatgctttggaagtattagaagagcattatggatgctcttctaatgcattcatgacatgaatgcgacaatggcagcaacagtcatgatgattagtagcaaacacttaaatggctactgtttctggcatttatatatatataaaatatatatgtataaaatacatatacacacactagtgataccttgatttcttaactttattttttcttattctttttaaaaaactgatacattaatatgaaaattatgtgtatttatggtgtacaacatgatgttaacacctcgatttttgaaagatagttttgtgtagtattctaaattgaccattgtttgttttgtttttggcttaaataacggaaatttattatctcaaagttctggagtctggaagtcccagatcaaggtgttggcaggtttggtttcttctgaggtttttctccttggcatgcagatggtcaccttctcactgtgtcctcacgtggcctttcctcttgcttgtgtacccctggtgtcataatctcctcttcttagaaggacaccagtcagactggatcaagacccactctgatgaccttattttaatttagtcatctctttaaaggccctatttttaaataccaatgacattttgaggtactgggagttaggacttcaactcgtgaattttggggtgcaggttgaaacataattcagtcagtaactatccatctatttatctatttttaaacctatcatttttaacgtggagtgctgtaagactgaagatgcttcaaagaatgaatatgtatatgaaaacttgtgatcgagtttttgttgtgatccttcctcctttgatcagtgtaaactggtcgctttcctgtctgtaatacagctttcaattcctacctttcaggattattgtgggatagattgactgcttttgtttttgttttatttagtacttttaaaacattgctccactgtctttaaaaaaaaatcagtccagaggtttatttatttgagactaataatttatttggcattctctgacccagtgatccacctgcctcggcctcccaaagtgctggacgcagtggccacgcctgtaatcccagcacttgggaggctgaggcggatggatcactggggcaggagttcgagagcaacctggctaacatggcaaaaaaccctgtctctactaaaaatacaaaaattagcccggtgcggtggcgtgcacctgtagttccagctactcgggaggctgaggcacgaaaatcgcttgaacgttggaggcggaggttgcagcgagctgagatcgtgccactgcacttcagcctggatgacagagtgagactctgtttcaaaacaagaaaataatttgatccttttgtgccttgctttgttatgccggtaaagagcagcagttaatctagagctaatttttccatgctactgagggaaaagccttttgagtacagtacctcaagtcccgtgaattgtagggttttccattctggctagcatggcaggaattattcttgttcagctcttgggaaatgtctcatgtagatcatgtagtctcatgtagatatgttctctactgaagactctagggggagtacctgtgttctttctctgtacacctccctcctctctggtactctgttctgttaactgcattggcttccttggcttctagctctgcttctgcaatccagggtgaccacttggctcaacttaggttccctctctgggcatggtcacctggtcacctggaagtggccatgatagggctcactttgtttttctcctctcagggagggaccaccgtctttcactgcctgatatccagtgtcttgaaagttatcatttcatttattttttctagttggtaagttgtttcaggtggctggaaggggtagattctagatattttaactccctaagcattaaatgtaaacccattatcagactagagtaagacctatattaaataattttatcgcttcataatttatgtaaggtatttatcacagtggtgacaaggcaaaaaaatgtttgctgttgctatccttattatctcatcaaaggactcaatgttggtgtcttccttacatttaagtgttaaagtatttaggtgagatccaatccagctgattacagctgcaccacgagacagtgctattgaaggaacctggtagtgggtaaagaatattgaaaaagttgagataaacattatggcagtggcccaaatagctattattttcttctttgtactaggaaaacccctggaatgtatttgagtttgggctgaatgaagactacttaaaaaaatttttttaaagcagttttgttgctgtgtgtgattagccacatgagtaagttgaagctatggagtgtgaacaccagaggtttgtgagtagcttccaggaagagtccttatagggagtgaatgtatccttttcttgccattgccttttaacagctggtgttggtgcttgctatcccatgtcattaggtggaagcagtggattcaggttaacagtaacaaagctgaggagcttaggtccctgattatcattggagccactggatccaccctgaatagttttaaggtgttttctggttaggtttttctgtcacttgcagctgaatcagtccaaaccaataatataatttattatgataatatagtataaaatatccgtggtatttaaaaattaccattatttctttaatattgccaaggaaataaggtgtttagaaatgtgtagatcagatgggacgtatctaaaaataataagagctatttatgacaaacccacagccaatatgatactgaatgggcaaaaactggaagcattccctttgaaaactggcacaagacagggatgccctctctcaccactcctattcaacatagtgttggaagttctggccagggcaatcaggcaggagaaagaaataaagggtattcaattaggaaaagaggaagtcaaattgtccctgtctgcagatgacatgattgtttatctagaaaaccccatcgtctcagcccaaaatctccttaagctgataagcaacttcagcaaagtctcaggatacaaaatcaatgtgcagaaatcacaagcattcttatacaccagtaacagacagagagccaaatcatgagtgaattcccattcacaattgcttcaaagagaataaaatacctaggaatccaacttacaagggatgtgaatgacctcttcaaggagaactacaaaccactgctcaacgaaataaaagaggatacaagcaaatggaagaacattccatgcttatggataggaagaatcaatattgtggaaatggccatactgcccaaggtaatttatacattcaatgccatccccatcaagctaccactgactttcttcacagaattggaaaaaactactttaaagttcatatggaaccaaaaaagagcccacattgccaagtcaatcctgagccaaaagaacaaagctggaggcatcacactacctgacttcaaactatactacaaggctacagtaaccaaaacaacatggtactggtaccaaaacagagatatagaccaatggaacagaacggagccctcagaaataataccacacatctacaactatctgatctttgacaaacctgacaaaaacaagaaatggggaagggattccctattcaacaaatggtgctgggagaactggctggccatatgtagaaagctgaaactggatcccttccttacaccttatacaaaaattaattcaagatggattaaagacttaaatgttagtcatttaaaaccgtaaaaaccctagaagaaaacctaggcaataccattcaggacataggcatgggcaaggacttcatgtctaaaacaccaaaaggaatggcaacaaaagccagaattgacacatgggatctaattaaactaaagagcttctgcacagcaaaagaaactaccatcagaacaggcaacctatagaatgggagaaaatttttgcaatctactcatctgacaaagggctaatatccagaatctacaaagaactcaaatttacaagaaaaaaacaaccccatcaaaaagtgggcaaaggacatgaacagacacttctcaaaagaagacatttatgcagccaacagacacatgaaaaaatgctcatcatcactggccatcagagaaatgcaaatcaaaaccacaatgagataccatctcacaccagttagagtggctatcattaaaaagtcaggaaacagcaggtgctggagaggatgtggagaaataggaatacttttacactgttggtgggactgtaaactagttcaaccattgtggaagacagtgtggcaattcctcagggatctagaactagagataccatttgacccagccatcccattagtgggtatatacccaaaggattatacatcatgctgctgtaaagacacatgcacacgtatgtttattgcggcactattcacaatagcaaagacttggaaccaacccaaatgtccaacaatgatagactggattaagaaaatgtggtatacttttatggaatacaatgcagccataagaaaggatgagttcatgtcctttgcagggacatggatgaagctgggaaccatcattctgagcaaactatcacaaggacaaaaaaccaaacaccgcatattctcactcgtaggtgagaattgaacaatgagaacacttggacacaggaaggggaacatcacacaccggggcctgttgtggggttgggggagcggggagggatagcattaggagatatacctaatgtaaatgacgagttaatgggtgcagcacacgaacatggcacatgtatacatatgtaacaagcctgcacgttgtgcacatgtaccctagaacttaaagtataattaaaaaaaaaaaaaaaatatatatatatatatatatatatatatatatataaatgtgtagatcagggcggctttaaaaaatagctttttgaagttaatagctgtttatgtatatgcctggtgttttacagacattttatgtcctttatttccttttcataacaatgctgcaaagttatgttattatctctgttttattgatgctatgaggtttagagaagttatgtaacagttgcgttggtagagttaatattcaatttcaagttcgtctgattccaaatcacatacttttttcactaacccatgcttttctaactcctttgctttaaatttttatctctgagtatcttctgattggtaaattaatctatttaggagatgccctgtaaaagtgactaaatttattatttcaggccacttatttcttttgtttcttatcatgttgacataagttacatgtcttttagttacttgcatcatttctgtggcctcattcgcaggaaaagttaagctttcctgaatctgtaaagttgaacaccaccataaactctggactcatgataatttaaccttatgttatataccatagatgagagtttagtctgaagaaggtctcaaactattaagcttcttaactgtgctggtatcctccatcaattaaaggtttggtttatgtatggttagctttaaacgaccaacttaggatctgaggaaaaccatttgacccttctagtctattctaagtctcttaattcactgagaaattttgatgcatttttagttttcattcacttactattttgttttagccctctctttttgttctagaatgacttattagcagtcagaggacagacataccatatcgtaggaacctaagcatgtcaataattacttaaaatacatggtcgcataaaatgtttacgtcttaaagaaatttactttttgtaatctgttatggcaaaatatttttaaagcctgcatgttccagacctgttctacctgttacctcttaactgagatgaagactgcatacctgaaagagaaattcactggtagaagagacacatgccagaactactgagaattaagtctttgtttatgtaaccttttagtttgttgagtctttccttttttggagtacatgaaattaaatactatggaataatttgccattctcagctgttaatatattctctatgctgtagaacttgttaatgctacctttattgttatataaacctgacatggtttttgactttagtaattgacaaagtatggatgtaaatttaacaaggaaaaacatttaaaattagtaatgttacatatacaagtgttgtatacattctgaattttcttggtctctaaggcctatccatcacctcctcttccacccacctctgatactggatatacgtagtatttatttatatctatttatttattttgcctcttttgcctttacaatagttacccattttccaacttctcaagttggagtgctaccagttgagggtagttgtattgagtagttcttttaaagagagctttcttagggtatatccaaatacttctctttccagtataatagccattagctacatatggctaaattaattaaactaatcaaaacaacataaattccgttcctcagttgtgctagccttgtttcaagtgcttagtagctacatgtggctagtggctaccatctcggacagcacagctttatagaacgtttgcagtgttctgttgagtatacttaataatcagaatgtggactgaagaaggcccctggtacaactctattttagatatatgtaatttaataatgtacttatggctttaatttctggctgaggttgttcaaaaaagtgaaatctttaatccctgtgaagcttgccttgcttaccagtctacattctgatgagttttttcactatgttttgaagtcttttacagtgctgcctatttaacagacaaataggactttgcttgttgttaaatgatttgccagaaaaaaattatggatatgtttttagaagtttattatattcctgattataagagtaacagatgtattacagaaaactggaaaatgtaaagagtaaacaattaaaacttatattatgccgactcagataatttactgtttttttttactagttttattcataatttaattaaaaaaattttaaactgttgggaattcatctcatagtttatttccattttgttcccctaacattgtagcataagagtttctatatgatactgtaaaacaacaacaacaacaaaacactctgaagcatacactgcagtattgaattcagtggttataattgcttaaccattccttgttgttggacattgtgttctgtgtaatggtgctctttgttttgtaacatagattacaagggtacatctctaacttcagaataattgttttactttttttggtaattatttgttaagtttatgtcttatactagagtataagccacttgagtgcaaggaccatgccttgattacttgtcttaggtcttttttgcattgagaaaggttataaagttattttagtgatatttttatcctcagtttatatcattgtgtctgatatatagatacttgtttgacaaattgaacttagataattggatttttcattttcataggttttgcttatggataagaatatgcacattttaataaagtaataattcagctttttggacacattcctttagggattatagtctcatttgtaatatacatttttccttttttgcagctcttttcacaggagaaagtttttggatatgctatttaaagagatgaataattttcaaggacatctatatttaagcatcatatttgcctggctttatcacataccacaatatggtttagctatttgaagaacatctttagtggcaaatgcaaaacagtgaatcatgggtgctgagatactggccacatttagttatgatacagctttgtagcttgtataagttgatttcaacagtgttctaaaaggaactatgaaaagcaaatttgaggatatgtatagttggggtttttttcctaaacttactgggttttgcatgtaaaatgtggcagatacgaaaccttattcatgtaaatatggtatatgttggaaattgtaatatgttggtaccaataaatgtactggtaaatgaagttctaaactattcctaaacactattttaaatacctttaacagtactgtgttttagtgaataatagtaactaaacagcatgtgcaatgcagtcagtttctttaaagaacatacagacaaaggacgtatgtcagtcaaaattggtataaagagagcagcaaattagaaaacattcatagtaatgtttttagatgctacattagactatgaggagaacattactattactgtgaaatacaaattgttgactgcaaatagtttttctggtatcattataaatgctttattcatttatcatagttctatagtaatacatttaaatctaccttatttttaatagcttttaatattccattgcttggataaattatttatccattacccctaccaaaggatttttgagtcactttctttacatctgagtatcaaagaatgttcttatatatatttatgcagattctaggaaaaatgctgtaattttttcctgtacttctgacatttcttcagttagtgttaaatgtttttataataaggacaaagtaaaaatttatatttgtaaaaaatgcttttaaaagttgtttaaatatttgagaggaaaaattaggttattttctctctttataacatgcaccaaaataaactccagataatcaaagaggataaaggtaaagtgagaaaccataaacaaaatgaaactatacaaattcccgtctgatctaaacataatagatatgaaaacaatcataatgtagtttttatttactgaaagtgaacaaaactaaacgagaagttaaaagagagagaaaaaaactgaggaaaaccatatgccccaaaaggcagacacagcactattatttttaacataaagaggttatacaaattcaccataaaacctcaaatatcaatagaaacatggtaccaggatttagacaattcaccaaagaaatgcaaacgacaaaaataatgctcaggatttaaaaatataaaaattaaaacatcaataagagataattttattcttataaaacccaaaaatattttaaatatggtagcatctgctgtagaagagcgtaaatttgtcccatttattcactgctggtcagagtctttcttgttagttttaatttgtctttagttaatagttaatagactagaacagttgtaggtttacagaaaattaagcagatggtacagaggtcccatgtaacagctactccatccccttccgtttctgttattaacatcgtaccttagtgtgatacacttgttacatacagttaatgaaccaatgttgatacattattattaactgaagtacatagttttctttagggttcattctttgctgtacatttgtttgggttttgacagatgtgtaatatcaagtatccacagttacagtatcatacaaaagagttttactgtcctaaaactcccccgtgctccacttcatcatcctcctttctttttcctcttgttgcctccaaccactgagctttttgctatctctagttttgccttttccagaatgtcatataaatggaattgtccagtgcgtaggcttttcagaatggtttctttcacgtagaaatatgcatttaagtttcgttcatgtcttttttgtggctgtatgattcatttctttttattgctgaataatattccatataccacagtttatcatttacctattgaagcaatattggttccctccagtttttggcaattataaagctgctaaaaacatttgtatacaggttttagggacaaaaccccaacataagttgaggaacatctattctcagcaataacaaatgcattattaatacatggaaaaaagatgaatctcagaattatactgaatgaaagaaccagtccaataaagagcacatactatttgatttcatttacattaattatataaacttcaaagtaatttatagtgataggaaaacaaatcattcgttgcttggagaaagtgggggcttttgaagaggggcaggagagggggatttttaaggagtacaggaaactttgtgggttgatggctatgttcattatagtgactgtggtgatgattttatggatgtatacatattgacaaaacttatcaaattgtacactttaaatgtgtgcttttattgtacgtcagttttaccttaataaagctcctttttaaaacgaagcttagagtttaaaagaatataaagtatatgctaaaaactgagaaaattttaaaatatgaatttgttaatttattgagaataactgtaataaagccatttaatttcacctatgtagtacttaatgaaaaatatgtttttcaatacaaaaagtttagtgagaagagtggcattgctctgtaattttgcaaatctttagtgtctgactttagtatgaaacgacggctggattctcatctgcttcttcatgtcatcagttgtgatatgttgtatttgttgaagtaaatgaggaaaaatcatcattgtacatatttgtagttggaaaagggagggggatagtaatagcctttctagataattctggatattcttcaagttctctgttgaaatcccccatcttgatatctcaaacatattaatagcagtgattttgaagtttatgttaagtttctggatctcctataggggtgtgtgtgtgtgtgtgtgcacgcgcgtgtgcgctttctctcgattttatgatattttagttttatcatctggtatggctgctaatgtttgactgctgggcattgcatgtgaaaaaattgcatagaattaggtaacattgtcttcaggaggatttacgttttcttctggcagttactgttgaggcagactaccttaatctattcagtaattgaactgatttgaggcagatttttaatcttttgagggttggtctagtttttatttttccttattacttctaggatatagccctttagtagactccattaaaaaccctggactttttcttcttcgtaagtccagaactctaatttttgtgttccctactctgcaagaatgctagaagctctcttaggcttctcaacttcagagctgcaactttgtagtcaactttaggttcacttctttctccacccaccaccctgccgcctcaaggattttggtttcaaatctttactgctttgggggctctccaggacttgagtagatttttaaaaataaattcgtttggcctttaaagcttttcctcattaataagattggctctatcaaattagtctgtcattggtagagatagaaatctccagattgtctaagaattgtttgtttttttaaaaagtgtttcactgtactagatagtagaatttcaggggcttgatatattataattactctcatgctgatttcatagctagttgagagttggagaagtaagttagagatcagaatgtcatctatattactggtgaaatctaggatgcaggctgtggctcagagacaggacaaaactgttgtcctaaatgaaacttgagtcatagatacatttttctcacagaggtgaaatcttccttgctttattacaagaataagagtagatgagaataaatgtgtatcatttatatggatcaaaattctggaaaattaagtaatttagtgtaacttaaaattgtaaatcactgttgtggtcagtgtgtgttatataacagacataggttgtatatacaacctatgattctttcttcaattgagcttttatttttatgaattttatgaattgagcttatatttttgtgaattttgcagagcgtggatttgtagtaagtaatgttgagcatgccaggatataaaatattattttgcattctcaggaattatcaaaaaatagaatattttgtgatgattttgtttgccatttggtaaccgttctgcaatctggttatttgctgttcatattcggaatttatctaagagtcaatgagttgtgtactccaggaattctctcagtattgcagtatatgtcacaataatgtggcaatatctttcatcaattctaagccatgtgattaggcatgttaattgtaggaatcacccatttaaaactgcttgactttgaacccaactctgctttaaccttttttttaaaaattgtaaataagacttcacagtgatggccagaactcatttagtattccgtgaggttgtaatcagtgctaacaccaggtgacacaaatgcagtcaagctacttcccttaaaaaaactcaccaaactttaggatcagattaccataacatgggctaaattaaaaacagaaatgaaatacacagtatttattacagggatatttaccaggaaaagaaagtatctttaggccatgttggtttgacttttattttacgtaattttataattagttcagtccattcatagaaatctctcaaagaaaaattttgacatagctcttttttttctttcatttcttttcttttttttgttttttttggagacagggcaggctggagtgatgtggcatgatcttggctcactccaacttttgcctccagggctcaaaccgtcttcccacctcagcctcctgagtagctgggactacaggcataacgccaccatgcccggctaatttttgtatattttgtagagacagggtttcatcacatttcccagactggtctcaaactcctgagctcaagtggtcttcctgccttagcttcccaaagtgctgggattacggacatgagccaccaagtccagctgatgtaatacagtaattgattggtttcatattaggaacattaaactacatttttatatttcatatactcatttttgtgatttttaaaacaattttttggtggagatggggactgaaataactttctaggtatagaaccctaatttgcaatactgtttctattggaaattcaaattttatttacaaatttaaatttcagtcattatcaaagaaccagttaggttgtaagatgggtgggagtcgtgtataagctcaattaaatcaaaccatctttattttgtgtatactgcatatgcacacacgcgtacatatacagtcattcctcgaagtctgtgggagactggttctaggacctctagaggataccaaaatccatccttgctcaagtcccttatataaaatggtgtagtgttttcatataacgtgtgcccatcctcctgtatactttaaatcatttctagattacttataatgcctaatacaatgtaaatactatgccggtagtttttttttttttaatagaaagtaaaacatgtttcaaaagctacaataaacctgtatccaaaggagtcctatacatcagtgatgtgctggactttgaattttgtggtacagctttgcattggactccctccggcctactggtctgggtacggcttgcttcctgcctgttgaagggtgaatacgctacacagagctatgatggtttctactgagtggtaaaattcacagaagttccaggttcatcatgtcaggatcattccttgtgcaaagtttgatgtagatgaagataaagtggtttcttggtcaataattgcaattgctttcttttaaagtcagtgggtttcttgtatagttctattacaattggcccaagtttaatttcatccatctccatgaaagcaaaacacttggtgctggtaaacctttttttaggcttgtagtgtttgaattcaaagaagatagctgcacctttggttaatttttcaacatgcttctggagctcaatgtccacattaaaatgaacatatgtatcttcttttcttgaagccacaggagtatcttgcacaggagttaagtctatgccattcagatcctttacactaactgtaatatagggattgatgcactgcccagcatctttcaaaccagttttctcaattctgatagtgagtaatgtcattcctggttccagtggcaaccttggtaagaaagtaccgggaactctagcaggaaaagaatcaggagaccctgctccagcaccaccctcttcttcatcttcttcagattccaaattctcttcttcaccaggtgccaaaattcttcttaatgggacaggctaaacatcaaatgggaattctttattatatgtaagaatattctttaggattggttctagcttcttcaggttctccaatttaaattcttcttgagactgtgtggactgtaaagctgtacttcgcaattctaagcatgttgcaattttgcctatggttttctttcttctgtgaattcagaattattgtgttgagcttgggcctctttttgtagatgtcttgctaatatctgatacttgtctatcgcctccaccagctggccccaagagtcgcagtcggcgcctctcctaaaactggcgccccagcgctgcagcagactccgggtcacctctgacatggctggtccccaccccgtcccctcctgcccctaccccagcaaggccgggttctagggcgccatccttcccaggcctggccctgacattaacagggccaggaggaccgctacggccaccaccgccacccaccgaggagccgcccaagcccatttttcgccgatagttgttatattgtattgtttagggactaatgacaaggaaaaaagtctgtgtatgttcagtacatatgcaacaatctgttggtttttttcctgaatattttcagttctgattgttgaatcagtggattcagaaaccgtggatatggagggctgactatatacagtctttttggtatgtttcattttcagaagtgttggtttagattcagatatatttgttatttagaagtctctttaagataatgttttctggctgggtgcggtggctaacgcctgtaataccagcacttggggaggctgaggcgggcggatcacgaggtcaagagatcgagaccatcctggacatcatggtgaaactccatctctaccaaaaatacaaaaattagctgggtgtggtggcatgcgcctgtagtcccagctactcgggaggctgaggcaggagaattgcttgaacctgggaggcggaggttgcagtgagctgagatcgcaccactgcactccagcctggtgacagagtgagactccgtctcagaaacaaataaacaaaaagataatgttttctgtcattttggtgacaattatgcaagaaaggaaggtcagcttcattacctggtacacaggagaaaaaagtatttataaaatgggatgctactgatttgactacttcatgtgtagaaaccataagatcatctttagatttttgaattatactttttaaagtacaaaccattcagtacgttttataatactgtaaattaattgaaaccattgttgttagtgtaattatagcctcggtagtttttcaaggaaacgtggtaatgaaatatcgagacctcagttacatatgtcttttggtttataccactgactttattagaatattagtttggcgtcattcttttttcccccaagaaaacctgctttctgtatcttcccatatttttcaagcaggtctgctatagttaattcctctctgtcagcatttggattgtttatactgtatttcccacatggtgttggtaggtattttcttgctgtattagctggctgcagtattatggctttgcttgctgatggaaataggtttgttcactaagctcctttgggcaaggacattagctcatccatttatgctgtagacatatttgttgaaatgatatcccggagctatcaagttaacagcggagttcttttacctgtttctgtattcctttgctttgattgagaaagtgaacttattttgcaattgattcttaaatcccttgtgtttaaaggattttatgtacactcagtcatttaatgaatatttagtaactacggcatgccaaccactggtttaggcagtgaacaaagcagataaaatattcctgcctatcagtttgcattttaataaggagctagataataatttaattgtttgtaggatagtgataagtggtaaggagaaagaaggtaaaacaaagataatgcgaaatatagaacttttaaagtttacatattataataagttctcccagaaaaggttacttttaagtgaagacttggtggagagctaccaccaactggtgcagttatatgggtgtgagcttttctgacagaaggaaatagtgagtccaaagtccctgagtcaggaacatgccttttgtggtttttaaaaaacttcttattttgaaacaattttataaacttactgcatacacaaaacatttgatttgtcaactgtccaaataatgttcttcatagcaaaagaatctgacccaggatcatatattcatccaactctcatggctctcgaatctctttcaatctggaacagttccccagtcttgactctcatgctcttgacagttttgatgattacaagccatttattttgtagaaattgttccagatttgccactgggagccctttcatactggcttatgtgtcctcttgacaagtcaccatcagtccttgtacacttctttacttatttttaaacttttttcttgaaataattataaattcacagtaactttgcaaaaatagtacagaatggtcctgtgtaccccatttcccatagtgtttatatcttacataactatagtttattctcaaaacgaggacattgacattgatacattgtgtatgtatagctctatgccattttatcacctgtgcacttccttcctttttggcacaagatgctacaagctcatcttatcattttcctactccagccttagaatcagctatttctgcaaggagccctagttccttttagtgaagagtagtattttaaaaccaagatctgagtgctagatgagctcattgctatgggagtatctattgtacaccaggccctttcagtggtcacatccaggaagcatgtgcatgcacgtaagtgtgtgtgtgtgtgtgtgtgtgtgtgtgtgtgtacacccacacagacatttatctacatctatatttctatatccatctttattttttttaactttatttttgagacggagtctcgctctgttgtccgggctggagtgtagtggcatgatctctgctcactgcaacttctgcctcccgggttcaagcaattctcttgtctcagcctcccgagtagttgggactacaggcgtgcgccaccatgcccagctaatttttgtatttttagtaaagacagggtttcgccatgctggccaggctggtctcgaactcctgacctcagttgttccaccctcctcagcctcccaaagtgttgggattacaggcatgagccaccacacctggccccctgtatcttttatataatgaaatctgttaattcatattgatacaatctagttccagctcaacaccatgagttcattgtagtgtgcccaaccctcctcccccatatttgtatttattctatcattagtatgagcctagttcggttattacatagtaactaattggctgaattcctcatatttagtcagtctcccaaccctgtaaaactgtggtgctgctcagttttccctacttgttagtgccctgtctgccactgagctaccttcctacaccattcctacttcttgtgtagggtaccggttgtgatttcgaaacgtttagaaggccagtgtggcagaagcatagtgagtgagacagaaagtaatgggaggtgaggtttgagagttaataactaggtggatgcgagcagatgatagactcaaaggctgggaattgtgctttactctcaatgaaatgggaagccgttggaggttttgaacagaggagtgacagcatcattctctgagttccattgaaaatattctaagaagagagagaaggcaaagttggaagcaagaagacctaatggtagacatttgcaatgattccagcaaaatgttggtgatttgtaaaggtggtgaaatctggtggagttctggattcattttgaaggcagtcttgaccagatttgtaagtgttaggatttgggctcttgagagaaaaagcagtcagatttgaatattaacattattggcctcagtatttgcaaggatggaattggcatgaatggagatgtgaaagactgaaggagggaagtggttgtagtaggaaaaggaaggggtagggcatagttttggacattattgtttgaaatacttactagacattcagaaaaagctgatgaatagcaaatagatatatgggtcttgaattcaggattttagttggaatagagataatgaatttaggagccatcagcacatatttaaagacgcaagacaagatggagttcgagggagtgagtgaatttgagagaggaggcccaaagacaggagaaaaccaataaagtatactaagaaagggcaaccagagaaatatgtgataaacgatttaaatgggttttcatcaaagcaaagtagaaaaagttttcaagtttttgaaaataatagggcaaggcagtcctgaccaaactttgacctgttattttgaaaaaaatagtgaaggactgtctaaagatgtttataggtcaagtaagatgtgaactgagacatgatcattggattagcaacatgtaggtcactgataagcttgaaaagaaaagtttaggagtgtgatgatggctgttagtcgggggagatctgattgtagtgaattgtaaagggaatgggaggagaaaaacttaagacagctagaataggtatttcttccaagaaatttttctgtaaagaaaaagattgaaatggcagctgtatgggaggtagggtcaagggattttttcttaagggtaagagaaataacaacatgtttccatgccaatggcagtaatcaagtagagaaggcggcgagaagaaatgaagagatcatgggagaattgctgttgtggtgttaatgagcaagagggaatgggagatttagtgtgtaggtggagggattagctgtagctaggactgtacatccataatagcaggaaagaaagtaaaatgtgtgggcacagatgcaggaacgtggatagatttggtgatgaaggcttgtacaagttctcagtgaggtaagaagcaagatttgaagaattctgcacttgaggaatttacagctaatagatgtgagataagctgtgtacaaaaataacttttataaggacaaagtgacatcttctttgaagaacatgtaatgtgtaggagttaggaaggagagatttttatcctggaggatcctgaagatttcacagaaataagttttatctgaactaatctttgaagaatagataaaaatttgaacaagtagacatgactgaagaactttaactttttaatttttttattttaatgcttagcactcagccttggtacatggctacccctcagcaaatgaatgagtgttgaatgttctgtggtgaaagactgtgaggaaagtgatggaagtagaaagaccaaggtgaaaggtgaaagtttgggtggtccaaactttccagtggatactgttcaatagatatataatgtgagccacatatataatttaaaatttcccaggagcctcattttaaaaggtggagggaaacagatgaaattaatttcaataaatatttcatttaacccagtataacaaagtattattttaacatgtaatcaatattttaaaattattaacgagttattaaaacagttatttcatattcttattagtactaagtctttgaaatccaatgtgtattttacatttaccagagcatctcagttcaagctaaccacatttcaggtgcttggtagccagatgtaactagtgccttctctatgggacaatacaaatctagagcaaatgtgaaagaagggtcgtaaatagtgggaagtcagattggagaaggtcgatggggcaaagtattccaaatgctagtttagacttgattttctaggcatttggaaggtatggaataatgttaggggtgcctgtaatcccagctacttgggaggctgagggaagagaatcacttgcggaggttgcaatgagccagaccataccactgcactccagcctgggcgacagagtgagactccgtctcaaaagaaaaaaaaaacaacaacaaaaaaacaccccaccccaacaaatttgaatattaagaagagcatgaaatgtatagctttatgtttcagaaagattactcagcagtagaatggagatgtactggagcagagggagattagaggcagggaaacaagttagtaggtaagaaataatgtgaatctgaaaccataatggagaaattttgttatttcttttaaaccatagttgctggccgggcgtggtggctcacgcctgtaatcccagcactttgggaggccaaggcaggtggatcacctgtggtctggaattcgagaccagcctagtcaacatggtgaaaacccatctctactaaaagtacaaaaataagcagggcgtggtggtgggtgcctgtaatcccagctagttgggaggctgagcgaaactccgtctcagaatgacttatacagagggaatgacttgaagtaaggggcaagggaaaggaattctaaacctgacttacatagaatggcgttgcttattagatgtagagtaggtaagatttttttttttttttttttgaggcggcgtttcactcttgttgcccaggctggagtgcaatggcgcgatcttggcccactgcaacctctacctcccaggttcaagcgattctcctccctcagcctcccaagtagctgaaattacaggcacctgccaccacgcttggctaattttttgtatttttagtagagatggggtttcaccatgtaggccaggctagtctcaaacccctgacatcaggtgatctgcctgcctcagcctcccaaagtgctgggattacagccatgagccaccgcgcccagcagagtaggtaagatttgaatgagaagatgcctaatttaattttggttatgttgatactaagatgctggctatttacacaacagttttttgagtatatacactatgactggaatatagaaaataagtttttacctttaaggaagataaaaaattccttacctttaaggaatttatgacctctgaagttttaatcttgtatcccatcattgaaaaatttttgagaatatctccaaatatattttatttataatttgtatacatggactatagtattaaaacatgtaaattacaaaatatacataaaagaggagtttttaaagtataattttataaacataagattgttataaatattactttattaatggtacaaactttttctttccccactaaatgacatatgctttattgctttttacaatttttgtttaatgttgttgcagtgatttgaagattaggttctaagttcagtttattttgctaccaggttttgagaactatcataagttttttttcctcctgaaatttcacaaggaggtatagatacaaatggaagaagcataatacgttagtggctgtagttactaaatcacaatactcactttctaattctgctcaccaatgatacaacttttttttttgcaccttagtagatcattttacactctcattgagtaggtccactcaacttaggagacttcttgggtcttttgggtatctggtggatacttggaaataagggtactggatcacagtgtactattttgtagaaacagggttattaagcctacaagatggttcaaagaataaagtctagatttttgttgactttattgcctttccattttgagtgtaagaaaaattatggctatttgtggcaatttaggttgtgtctttgagtaattttgtatttcttttaaaccatagttgttggccgggtgtggtggctcatgcctgtaatcccagcactttgggaggccaaggcaggtggatcacctaaggtctggagttcgagaccagcctagtcaacatggtgaaaacccatctctactaaaagtacaaaaataagccaggcgtggtggcgggtgcctgtaatcccagctagttgggaggctgaggcaggagaatctcttgaacctgggagggcggagattgcattgagctgagatcacgtcattgcactctagcctgggcaacaagagcgaaactccgtctcagaaaaacccaaaaaaaccatagttgctaatgtgtatctaaattggttgataaattattattcctacttaaggtgctgttattgccagaaatgaaggagcaatatgcagatttatggatgaaatggtctagttggtaattagcctttagaaactgtagatttacctattagttatcaaattgtttcatcaatgggaccttttctctgacaaataaggatttataggctaccaaaatatgaaatagaccccaaaaactgtgaattagattcgctttccgagacttgctcatcattctttataggggagggcacatagagtggacaaaagagagacaggatagatatttaaaaggttgttaaaatgttttctgatttttaaaaagtgtttacttaaaaaagtttcctgagaggtatgaaagaactgttgcctcctgggtaaggatgagttgtgccttgcttctctggtttctgttgagaagaacatttttacttttccatgaaaattaggttggctactcgttctgcatagttacaaatgtagttagaagaagaaaagagaagcgtgcgtcctttaaaacaaccatcaacaactattttcttcttgctgtgttctttcgtggttcttagtggtagttatatgaatagcagaaagacctgctcctggttgcagcttctgcctctgctgtatccctaagtggctctgcctcaaaacacttctccatttttttttttctagtggaacttttacgagaattgaatgagcgagtgactttcttttgcacatagtatgaactcagtaaatgttaatttcctaatgtgatctgtgggcacacatttttgccctttgatttttcatgtgaacttggttttttataaaagtacttggttgtgccttaaaaagttcattgtttagatttgattaatatttgactggaaaattgaagatgatgtctgtgggtataatgatttgatcttggggtatttccagtgatttttttttttttttgagatggagtcttgctctgtcgcccaggctggagtgcagtggtgcaatctcggctcactgcaacctccgcctcccaggttcaagcgattctcctgcctcagcctcctgagtagctgggattacaggtgcgtgccaccacacccggctaatttttgtattttttttttttagtagagacagagtttagccatgttggtcaggctggcctcaaactcctgacttcatgatctgcccgcctgggtctcccaaagtgctgtgattacaggtgtgagccaccgtgcccggcctccagtgattttttaatgtggaatataaaatgagatttttaaatctctgtagttttaaaacatatttataataactatagtgatatatcaaattctgacaatagggaaagatagttttgtgtttgaaattcctttaattccatctcagattctccagcagggcagctctcctcttctcactcaaaattgctgacttgtttttaagggttatgagaaacatcttttggaagatgggatccaaagtataaagtcgtgtgacttctcataacctgctccctcccagcactttgaacacaaataagctttgaaagtgtttggaggataagtctctgtaataaaaagttttcattgaaatgtagcagacttgaggatgagtttcctactcatatgtcctccctgattgagaagatacaatatattagaaaaggtatgtgaaaatgtctaagcacaatgatggcaaacaggttttaaagttcatttgcccctgtgtgtggtttttttttttttttttttttttgagatggagtctcactctgttgttcaggctggagtggagtggcacgatcttggctcactgcagcctctgcctcccaggctcaagtgatgctcctgcctcagcctcccaagtagctgggactataggctagcaccaccatgcccggctaatttttgtatttttagtggagacagggtttcacaatgttggtcaggctggtctcgaactcctgacctcaggtaatttgcctgccacggcctcccaaagtgttgggattacaggccactgtgcctggcctcctgtgctatttttatgttgtcagtaagttcattattatccaatgcacccaaaacattctttgtaaatatatgtctatatataccctcacagaaaagtatgtacattgtatgtatacagcttgataaatttttacaatctgagaacccatataatcagcagctaggtcaagaaacagaattttccagaatgtccccttatcctgaccttctaatcaccaccccacctatgtttttcatgaaatttttatttttatgtacaagtttttaacagttttagggaaattacatttgcttttaattacctaatgtatgtttaaacatcattaattagaaagaaatgggatattttgaacatttctatcagaaacttgaaaaaattttgttcataaaggtactcagagagctctgtgtcctccacatggctgacctaatataatgtggtaatagccacaaaaaggtaaaatacttagcatatagacttaacaacatgtatttagaatagatgtgtttatcactttgctgaaagaaatagatggagagacctaccttgttcttggatgggaaaaaaaagttagtttttctcaaattaacctattaatccctgttaagatcccagttcagagaagagagagaaaaaaaaacaacatatgacttataggaggcggcgaatagtgaaatgcattgggatttaaaatagcatctgttttagtagagatatggagctatagataataaatgagtaattttttaaaaggtctaaatgtattaagactgtcttctgtaataccttagatcttgtttacttagatttgctatattttattatgagttattaatacaaatttcaccacaaaaaacttaggaaaagaataaaatgatataatttcatcatggtatgatagttattgtattttttgctttccattcaaaaatttcatatacataattcccttaagtagaattattatacatttaatttttattctgcactttttaaacattaattttttaaaaatactaattcctacctagtctttgtaacaactatttttaatgattggttaatataactttgacaagctttagtaaaatttacttagtttttctgttccagatttttaggttgctttgagtttcttgctattataaataatgttgctccaagcacttttgtgttatatctaatctttcccagattttaactgtcttaaataaaatgttaagctgtataaacttaaaataagactgaaaattacttggcagtgaaagagcttttaaaattgattaaaacataagtacattcataacaaaaggagttacagtgactagtacctaacctttgtttcatttggcatcacagtctttcattagttgtcacactagccctgagacttaaatgttgtattgcatagatgtcaaaaatgagatttaaaggagtaaaataattttctttatggaacacattatgttagtgatggaactgtttttggttctgttagtataaaaaatgtgctaataggtttagacgttaaagtgtaaaaaccttccatctctccatatcctaaattacgtaatctttaaatgcatagtgtgtatttaggtgatattgaaaatagtggtaataatagctaacatttattgagtgatattgtttggagatgaagcagaaatttaacttcacaattgtagaaaaataattttctatatttaggttcttaggggtggaaaccatatagacaaacttcttgttataaatgaaaaagaaggttctgtttatttaattgacaattgactagaaacaggctgggaagactgtttcttgtcattaagtgtgaatatgaccaaactgttttaccttctaataaacaaaactttatctgtttgttgtatcttttcaaaatttaagaaatactggaatagctctatattcagagtagcttagctatctatctacttaactgtatatccacaaatattttacagacaaatgttgctttgtaatttagttggccattgtcatctccagcattcttagttactagatagactttataggaaaagttgttcctccaccatcttgccccttcagctccaaaatgtccatgaagtgtaggttattctgctttgagaccctttgttttctctctctctctctctctctctctctctctctctctctctctctcctctctctctctctcctctctctctctctctctctctcttttgttttttgagatggaatctcgctctgtcacccaggctggagtgcagtggcgcgatctcggctcactgcaagctccgcctcttgggtttaagtgattgtcctgcctcggccttccaagtagctgggattacaggcgtgtaccaccacgcctggctaatctttgtatttttagtagagacggggtttcaccatgttggccaggcaggtgtcaaactcctgacctcaggtgatccaccctccttggcctcccaaatagttgggattacaggcgtgagccatcatgccaggccttctcttaaggtagtctggtcttccctggagtatctgtaatggagcactatataaacagatcctgccatcagtgtatttaaagtactgctgctgaacgatattatgaatatcaaaatattgaagccatataattattctgtgtactgtgagcaccaaataggaaaattaataaaacataaaaccagcaggccttttgggggtatttttcttgcatgtatgtgttatatcctggatgagattttttttttttgccctaaagtctatctgtgatacttaactgtacaagtttcaaatatggaaaatactttttaaaaagtctaacttgcctacaatcagaataacaactctaattttatctggccagtagtttctcagttgaataccaatattaaattaagaataggattcagtcagatgatgcattactttttctaatattttataataggtgtgtaaattgcctgttttctgttttatagggagtttcaggtaacattgtatgtaatttttgaggagagaagctttttttaatagaaaagataaaattgttgatttataagccataagaaatctagtaatgcaggctgggcacagtggctcacacctgtaatcctagcactttgggaggccaaggcgggtggatcacctgagttcaggagttcgagaccaacctgggcaacatgatgaaaccccgtctctactaaaaatacaaaaaagtagccgggcatagtggtatgcgcctgtagtcccagctcctctggaggctgagacacaagaatcacttgaggtggaggaggaggtggaggtggaggttgcggtgagctgacatcatggcactgcactccagcctgggcgacagagcaaggctctgtctcaaaaaagaaaaatagtaatacaaatataatttgatcttaattttattcatgtgtttctaaacaatatgttacattatgtattacacaaataaaataataaaacaatgtattacattatgaatgcaatttgattcatatcttcccatcaacttaatattttagaagaaaaaaattagaatttaatttaaaaaataccaataattattcaaagcagcattgggcccaataccaaccttaatgcttctaagctgtgcagttctgggaaatggtttaagttctccaagccaaatttcaactaaaaaatatggtgatattaagactgtataattaacaccatataattccaccatataattaacaccatataattaacaccatataattccacagtctgttaggaaaattaaataaggagatgttatataaagtgtttggcatcatgtctatccaagaactctgcaatagcagctgctttattatcagcacagagcactatcaccattagaacaattaccaactttacatttaattcttctaaaaccttgatcaaatcaataatgtgattttttgctctttcctttctttcctttcttttctttctctctctctttgtcttacttttttttaaatttttttttgagacgggagtctcactctgtcacccaggctggagtgcagtggcacgatctcggctcactgcaagctccacctcccgggttcacgccattctcctgcctcagccttccaagtagctgggactacaggcgcccgccaccatgcctggctaattttttgtatttttagtagagacaagtttcactgtgttagccaggatggtctcgatctcctgacctcacgatcctcccgcctcggcctcccacagtgctgggattacaggtgtgagccaccgcgcctggcccgtacgttcttttaaaatcagaatatgctatcgttaatgcctctctcattgtaaaggttcattctctttttaggaccacggctgaggttagggtgaagccattcaggcacttggaacaaaatttgagggagaaccctaaaaagccacagtaatcaagatattttaatgtaatattttaaaaattaatgcaaagactcactatgaacagaatatcaaactcaaaattttaaagaaaggcaaaatcaggaagagtactgtgccaagccatattggcatgtgaggcaaaaaggaaaaattaataatactggtcctatcttgccatgctgagccatgttagagcctgaggctcaaggaaaagtcataaaaacattcctattgctcctgtcttttgccctaggaaagtttctttccctatgccaggccttgctttaactatttaaatagccaatttttaaagaactgctcaccagaatgattttataggctatgaactcttttttacaaatgagggccctagaagttgggtgaaattacttgtgtagggtcacacaattttatcttttcctctattaagtttttctcctcaaagttactgctaacctctgagttgctaaattctcagtcctcaattaagttgacttagccgtcctcaatttaagttgccactaaatggcagaaccgtgatgatgtaacccaggtttcttaacttctagacttcctttactttattatctctttataaaacacatctgtgtatttgttggctcattaccctgagactgggtaatttataaagaaaagaggtttaactgactcacagttccctaggctgtacaggaagcgtggctggagaggcctcaggaaacttataatcatgacagaaagcaaagggaagcaggcatatcttacatggctgggaaaggaggaagagggagaagggggaggtgctacacacttctaaaccagatctcctgagtactcactcactatcatgacaacagggaaaagtcttaccctgtgatccaatcacctcccaccaagcccctcctccaacattggggattacaatttgacatgagatttggacagggacacaaaaatccaaaccatatcaactattttagttatgtatttgtgtttggagttgaaatagcaaacagaggaaatgtgttacaaattcatttaaataacatttcctggtcactaatctgtacagcagatacacagaaatatgcttcctatgctctgtaactaactgtttctttggttgtcttgactttaaaacttgtttgttatttagtattcttttagaggaataattttactaattaagtttattattttattaacttttaagttcaatattgtttataagagcatcataaaattttaattctgttacatataagctattctggcttggacacattttttaaccttttaacctttaagcttcagtttctgtgcctactaatgtaggtatgacaatagtattaacttatatgctgtgaggaataaaatgttaaatgcatgtatagtgctttgcacaatacatggtgcaaagtaatcaagaaaggtccctgttaataatatatgctgtattaacctgtataatgtagttaaagtttttggtaggtaggctgtaaagaataagacataatttgtggtcatgctgaatgctaggtattatttacagtctatgaatatggactttttttttaatacggtatttaaaatagtagtactaagaaagtggtgaacagtgatttagaaataataaacttgtaatccaaatagcctttagaaaagttactgctaacctctgagttactaaattcacagtcctcaataaggttgatttaccagtcagattaactatcattagtctatcatttgtctatcattctgtccctcttcctgcactcttcatctggcttctaagatgccatgatggtcttgatttccctcctcaaaaaaatggttgttcctttttagtcccctcttctcccttgtttcttaatattgatgcatcccaggactctgtacttgattcttttctgtttatctataatcagtcctctggtgatcttacccagttttatagctttaaatactacatatgtgctgacaactcataaatgtataaaattttcagctaaaggataatttgtgcctcatttagcaattgaaattcctaagagggtatctccatcatattgcttatcaatttagactttccaggttggcagagtatttccaatctccttttatttttatttttttgaagcattttatttggatgtttaacaacaattagtttttttttttaagacagagtcttggtctgtcgctcaggctggagtgcagtggcgcgatcctccgctcgctgcaacttccgccccctgggttcaagcgattctcctgtctcagcctctcgagtagctgggatcacaggcttgcgccaccacgcgcggctaatttttgtatttttggtagagatggggtttcaccgtgttagccaggatggtctcgaactcgtggcctcaggcgatgcgcccgcctcggcctcccaaagtgctgggattacaggcatgagccactgcacctggccaacaacaataagatactaagaagcagtgtacagtgaaagtgaaatcaagttcaatacttcatttcttgacaactgaagtataaaaggctctgtgttcaggaaaagttagaaaaatagatcattttatgtatatgtattttttccctcataataattatagtaggggaaactgggtgtttggcttatacatgtttttttaaaaaatacagtaggataacacatttttctccctgcctttctctcatgctttttgcatatagacaacctaagttagtttctgcattggagctaattcacgtttctcagctggtaaccttagagatgtaactgggctagccgggggcatagaccaaggcttgattgaaagctgtgtctgacctatctagtgatgcagattcatatgaaacttgggcaataagatgttgttgttgtttttccctccagtgtcttattttaggagtggggattttcactccgggtactgattttctcgtaatcagtctggttttaactcctcacctcatttaggcccttttaattatcagtcattgatcttgctgctttctgacctgaaatccaatagacctctgtgacttttagcacgtacccattgcttggcatttttctttctggtcagttattggtggtagtgttttgtttagtctcagtggggctgtcattttcaaatgttctcctgtcatttctgtacggttggaaacaggcagatcgttttcttcattgctttaaaattttggttgtagtcttttcctgaatttatttgtatttctttttagcatttctttatctcagttttagtatcatttttaaaaaaaatgagatggggtcttgctgtgttgcccaggctgctcttgaactcctgggctcaagcagtcctcccacttcagcttcccgagtagctgggattacaggggtgtgccactgtgtctggtttagggtcacttaaagaaaataatcacagttgaaatcactgacacttaaaacttatgaaagtttatttgaaactgcataacaaggaaggtcacagacatgggctttcaatcaagtcctgagctaactcagcttgcccagtgactggatctcagtattaatttcatatacttaaaacactgttatctgaaaacaattcagaatttttttcttaaaaggtgatactaagtagaataaattttgattgtaaaaattataaacgtaaaggcctcaagtaagaatgtaagtttataaatgtatatgttatcaacctacattaaagtatcatagtatcattaaaaattgatgctacgtaaaaataatagtgcctaattgtgatagtgtttggtctttaaaaaatggttttataaacaagatggttgagttgagcaaatgttcagatgttccaaatgctgaaaaagctctctgaccctattctactggggaatcttatgggaaaatatttataaactttccagattagttaatcttcacataatcccatctcttggagagaacttttggggaagatacgggggagcaaggatttcattcttttattaatgtcaagttgtagtgttgcttcaaagaaaggcttctcttgtcttatgtgtaaatggagattttaatgcagagttacttttatttcagtatgaagtgttaatattctatctgtttgaaaaatctctgaggaagatttactgttgcaatagaagccttttccttgtcaatttatatttttcttctttttcttctcgtggaggtaaatggaagcatggaagaatgctttccatatgaatatacttttctttgatttgaaattgtaatacagagtataagtctagatacatctaaaatataaatgattcagattttacattttaaacttactgaaatatcaaaattatactaataaagatacattgatttggtacttaaaaatagcctaatatgctcaaatgttagaatccttgaaaagtagtccagctgttttggaggagtgtgtgtgtgatgttgtttatgtgtatgtgtgtgggagggtatgtctcaatgtgtgaatttaacaatcccagcttacctggaagttggattttttaaaatgtatttttttcttttagttgaagagaatgaagattgctttgtatctgtattagatatcagtgggatataaatcattttgttattaaaaatgttaatagtttactcttaacacctttgcccctttctgttattaaataatattttcacaaagtgttaacattttttagtgaatgaaaattaaaaatatgaactataactgagtggcaagcatagtatgtacagttattctaggattagtagattaattacctttctaaagaaaaattttttttcagagacagggtgtcactgtgttgcccacgttggtctggaactcctgggctcaagtgatcctcctgctttagcctcccaagtagctgggattacaggtgtgtgctgccacacccacctggattacctttctaaattttctgtgtaattttccccatgttttccccctatccaagtcccctaaaggtttatttttactgctgtttcgttttctgcaatcctctagcttcccgtttaccctcccaggctcccattgtttcttttagcagggtgtcagtctgatcattgagactagagggatgagttaagtctattggacctcctaagatttaggttgtatgctgctactgtcatttcctaacatcatgaccctgaggaaatcaaagtcatgtaatttctctgtgccttaatttgtttcttcgtctttaaattgaggatgtttcctcctaccttccacagagttacttggcgttgagacaatgtatgtgatagtgttttagaaatcgtgctaccttcacaagcatttccattgagtaatctgagacttaattactttctggtgagtttttttcacctccaccattatgtgtatatagtttttttctgttttaatgcatgttcactgtagaaaatatgggaaatacagaaatgtaaagaaaaaatagaaatccagacaatgcatcatccttttgttgttgttttaagaggaaatttagttttgagactgagctcccagagggtaaggatggtgttatttatttttggattttctcttcttaatctgcactaggcacaacattaatgcaggtttaatgagagggaacttagtgtagctgtatttcttgaagtcaaaacctgatgaaatttggccatttgaagagagaaaagaagacatctgtctagcaaaaataataatagatacatgttttgaaattacatttttccattggccgaaagaacacaggaaaacatgataggggcagtcctaatattctctgacagaggttaggaaaccagttaaagctgttggatatggaacttatggacactatcatatcaaagtgggttggcattttcctggtgaaaatgacataaataaaattaaaagacttttttaaatgaatgcttggaaattgtaaaaactgtcatttcctctttttatttcttaacaggatggcttaaattccttggtccttgatttagattttcctgctttgaggaaaaacaagaacatagataatttcttaaatagatgtaagtatgtttaaacttcatatttgatcttataactctacttttgataagagatttttgtttggttattatcagcctataaatttattaatttaatcaacttatttattaaacttaagtcttttgcttaccatttgatttattcaaaaattgttacttttatttttaaagcaattgcagaaccgaattacaatatgcaaagcagataaagttctaaattttgaaatacattattaagactattttaggacaggttatttatagcagtttgaagagaagttttaaattaatatttacaattccaagacttaatattgcccagagaattaataagctttatacttctgtaattgtggacatttcagactagttaataataaataatgtaactattattaccatatgtgtggtaacccttaatctttgccattattaatgttgcaatgcagaagtaagtgaaattgaattccaagaataagaaattctcaaaacaattaatgtatacattgtatcatcacagtaagctctttactttgaaattggcagagactgaggtattttcccaattaaacaatcttatctatagttactatttatatagtatgattaccacttttcagagaagtaggccatcaaaattcattactaagattagccttgcaagtaatttcatggcaactttctgccatgattcagagtgcacaccaggattgcttgggtcatcactgtgtcagctatcatctaacttgctaagcaacagaatcagaaacagaatagctgtaactgctactttttggcagtcagtggtgttcatttatatgtgttaataaaccatagagagttttggttctttaacgttaatgtatatcttagatttttaactaacagcctttaaaaactggcaagtttagctaaaaactgtcttttcttgaaacaaaaatatatttataaatgttgattatgtaaaaatataaatatgattgatattataagtatggtgatctttttatggtagatgagaaaattgtgaaaaaaatcagaggtctacagatgaaggcagaagactatgatgttgtaaaagttattggaagaggtgcttttggtgaagtgcagttggtaagaaagtgttttgttcttattgttctctatgacatcatggttttgtgaagcattatcaatagcagctgagtagatctaatttctatgcccacccatgccagaaggtggctttgtgatcttggtcagtgtcctcatctataaaaggaagcctttgttgtctactctgggtctcttccagctctgaaacacattgtagaaaataaggccaatatagcttcacatgtgatctgcctagcagttactattccaccagaactgttgtatttttatttagaatgttcagattaaaaacatctgcttaggccgggcgcggtggctcacgcctgtaatcccagcactttgggaggccgaggcgggcggatcacgaggtcaggagatcgagaccatcccagctaaaacggtgaaaccccgtctctactaaaaatacaaaaaattagccgggcgtagtggcgggcgcctgtagtcccagctacttgggaggctgaggcaggagaatggcatgaacccgggaggcggagcttgcagtgagccgagatcccgccactgcactccagcctgggcgacagagcgagactccgtctcaaaaaaaaaaaaaaaaaaaaaaaaaaaaaaaaaaaaaacatctgcttaaggaactgagatttatttagatgtataagaaacctaacagataaattttaataactgaaattaaatctgaaatttattttcgcaggccatactggtaccaattggaattataagaaatgttgacaataactattacctttatattattggctttggaactcttcctaatctcgtattcctgttttcatcacctgagtatatgaaactcctctattattgtccttatagttaaattagagtcaaattctcttcttcacactacagcgtttacccctcttgatggagcactaagaaaagtagtgatcattataagccagcatggattttgttaagaacaagtcatgatagacttttttttcctttcattgcttctttctttgggttttttgtttctttttgttcctttttgagacagggtcttgctttgtcactgaggctggagtgcagtggcacaatcttggctcactgcagtcttgacttctcaagctcaagcagttctcctacctcagccctccaagaagctgggactataggcatgtgccacacacccagctcattttttgtattttatgtagagatggggtttcaccatgttgccgaggctgatcttgaatttctggactcaagggatctacctgctcggcctcccagagtgctgggagtacaagcatgagacacctcactgtgcctttcttgataggtttattggacttgtagatcagggtagtgcaatttatgtaatacatatccataagaagaatattattcttctgaagaagtctgacacacttgaggataatatgatgaaatggcacagtaataattgtatgggtaggcaagctttataactaatgtactagttttattccaaggaggctggtgaaagcatggatggtacatgggacagagacctccaagaaaggtttcagggtccctcttctcctattaaacatttttttttttttttttttttagacagagtttcactcttgttgcccaggctggagtgcaatggcgcgatctcggctcaccgtaacctccaccccccgggttcaagcaattctcctgcctcagtcttctaagtagttgggattacaggcatgcaccaccacgcctggccaattttgtatttttagtagagacagggtttctccatgttggtcagtctggtcttgaactcccgacctcaggtgatccgcctgcctcggcctcccaaaatgctgggattacaggcgtgagccactgcacccggcctcctattaaacattttaatgacttgtttgggagcaatggtagcacgttgaataattttgcaaatgagttaaacctgaagtataatgaggatgattttaggtgatgagccaaaattcagaaatcatcaatgggaaagaacattggccagatagaagtgaaattgaaccagaatatagtacttggatgtgaagaacacagggaatagttgcttaacagtactgtcttaattaaagaaccattttccttggattgtaagcaggcaagagtcattaatgatcagactacctaaagtagtaaagaaatttggggctgctttaatataatttctaaattgatagaaattgatggaccatacctgtaatattttatttattctagatgccctgttggcctgtttttttaaaaaaagactttagtttttttaagagcacttttaggttcacagtaaaatcgagaggaaggtatagagatgtcccatataccccttgccccaacgtgtgcatagacacttccattgtcagcatccctcattagagtacatttgttacaactgatgcttacattgacacattatactcacccattgtcatagtttacattagggcttgctcatggtggtgtacatcctataggtttggccaagtgtacaatgatatatgcccatcgttatactattatacatagtattttcattgccccaaaaatcctctgtgctgtgcctattcatctcccagccccaagtctctggcagtcactctttttactgttttcatagttttgccttttccagaatgtcatgtaattggaatcatacagtatgcaaccttttcagattgtcatctttcactgagtaatatgcatttaaggtttctccatgtctttttgtgatcctttagcttattactttttactaaacaatattctgttgtctggctgtaccaaagtttatccattcacctactgaagggcatattgattgcctccaggttttgacaattatgagtaaagcactatagacatccatatgcaggcttttgtgtagacataaattttcagttcatttggttaaataccaaggatcttgattgctggatcataggataagagtgtatttggttttctaaaaaactgccaaactgttttctaaagtggttgtaccactttgcattcctaccagcaatgaatgaagattcttcttgcttcacatcctccctggcatttggtcttgtcgctgttataactgacaaaaaacaagtgttttggttatttgattaggtgtttaacagtatctccttattaatttgacatttccctgatgacatatgatgtggaacatcttttcatatacttatttgccatctgtatatcttttcctttttttcttttctttctttctttctttctttcttgcttttttttttttttttttgagacggagtctcgctctgtcgcccaggccggactgcggactgcagtggcgcaatctcggctcactgcaagctccgcttcccgggttcacgccattctcctgcctcagcctcccgagtagctgggactacaggcgcccgccaccgcgcccggctaatttttttgtatttttagtagagacggggtttcaccttgttagccaggatggtctcgatctcctgacctcatgatccacccgcctcggcctcccaaagtgctgggattacaggcgtgagccactgcgcccagcctctttttttttttttgagacggagtctctgtcgccaggctggagtgcaatggcgctatctaggcttactgcaacctccgcctcctgagttccagtgattcttcctgcctcagcctcccaagtagctgggattacaggcacttgccagtatgcccggctattttttgtatttttagtagagatgggtggggtttcaccatgttggccaggctggtctcaaactcctgacctcaggcaatctgcccaccttggcctcctaaagtgctgggattataggcatgagccaccacgcctagcctgtatatcttctttgatgaagtgtctgttcaggtctttggcccattttttgattgggttgtttatttttttttattgtttagttttgagagttctttgtataacaaattcttttggataatagacctttgtcaggtgggtgtttttcaaatattttcccccagtctttggtttttcttctcatcctcttgacattgtctttgagtagtagacaatttgaattttagtgaagttcaggttatcagttctttctttcttgggttatgtctttggtgctatatctaaaaaaccattgctctaatcaagataatttaggttttctcctgtgctatcctctagaagatataaggtctggtcttgattctttttttttttttttttttgcatgtagatattcagttattccagcaacatttgttcaatccatcgtattgcctctgctcctttgtcaaagatcagttgactatatttatgtgggtctatttctgggctctctattctgtttcattgatctatttgtcttttctttcaccaatatcacattgtcttgattactgtagctttatagtaagtctataggttggatagtttcatccctcccattttgttcttccttatttatttttaattattattgtttgagacggcatcttcctctgttgcgcaggctggagtgcaggggtgtgatcctggctcactgcaacctctgcctcctgggcccaggtgatcctgctgccccagcctctcgagtagctgggactacaagcgtgtgccaccactcctggctaatttttgtatttttagtaaagatggggttttgctatgctgcccaggctggtctcaaattcctgggctcaagcgatctacctgccttggctttccaaagtgctaggattacaggtgcgagccactgcacctgactgttctttaatattttgttggctattctgggtcttttgcttctccatataaactttagaatcagtttgtcaatatccgtgaaataacttactggggttttttttgtgattggattgaaaatatagaccaacttggtctatatttgaagaaccggtatcttgacaacattgagtcttcacatccaagaacatggactgtctctccatttgcttagttctttgatttctgtcatcagagttttgtagttttcctcatatagatcttatacatgtttagttagatttatgcctgttttatttttgtaggtgctttaatgtaaatggtactgtgtttttaatttcaaattccactttttcattgctcatatacaggaatttaatttcatatacattgctcatatacagaatttaatttcaaattccactttttcattgctcatatagaggaatttaatttcatatgtattgctcatatacagaatttaatttcaaattccactttttcattgctcatctacaggaaagcaatgaacttttgtgtattaaccttctgtcttgcaacttggtataatgacttgttccaggaaactttcgaatcctctacatagatgatcacatagatccttcccaatctgtatacgctttacttccttttcctgtgttattgcattacctcggactttcagtacagtgatggaaaggattggtgagaggaaatgtccttgcttttgttcttgatcttagtgggaaagctagtttcttaccagtaaacatgaagtgagctgtggattttttatagatattcaagttgaagttcctctattcttcatgtactgaggtttttttttttttttttttttttaaatcatgagtgggtgttggatttgtcagatgctttttctgcatctatgatatgatcatctgtctttcttttttagcctgttggtgtgatggattacaataattgattttgaaatgttgaaccagtcttgtatacctgtaataaatcccacttggttgtggcgtataattcttttacaccgcataatacattgttggatttgattggctaatattttgttgaggatttttgcatctgtgttcattagagataatggtttgtagttttcttgtaatatctttgtcaagttttttgctgacctcgtagaatgattctggaaatattccctctacatctgtcctctaaaatacattatagataatttcttcctttaatagttggtacatttcaccactgaatccatctggacctcatgctttctgttttggaaggttaataactattgatttaatttatttaataacagtaagtctgtttcttcttgtatgagttttggcatattatgtctttgaaggaattggtccatttcatctaaattattaaatttgtgggcatagagttatcattcattcattcactgagacaagttcttgctctattgcccaggctggagtgcagtagtgtaatctcagctcactgtaacctccgcctcctgggctcaagtgatcctcccaccccagcctcctagtagctgagactacaggtgtgcaccaccatgaatggctcaattttttttttttttttttctgtagagatggggtttcaccatgttgcccaggctggtctagaactcctgaactcaggtgatccgcccgcctcggcctcccaaagtgctgggatttcaggcatgagtcactgcacccggacccttattatccttattaatgtctgtggaatccttagtggttttccctccttcatttctgatattggcagtttttattctctctcttctagccaacctggctagagccttatcaatattattggtcttttcaaagaaccagcttttagtttcattgatttttgtgtattcttgttttctattccttggtttctgctctaatttttattatttattttcttttgcctacttggaatttaatttgtttcttctgtttctagtttcctaagttggaaactcagattattgattttagatatgtgcattaagcactgctttcactgtatcccaccaattttgaaaagttttgtttttattttcatttatttcaaaatatattttaatttctcatgagattccttctttgacccaagagttatttagaattatgttgtttaatctccacatattttgggattttctagttatctttctgttaccagtttctggtttaaatccatagtgatctgagaatagacacagtatgatttctatttgaagtttgttacggtgtgtttcgtggcccagaatgtgatttatcttggtgaacgttccatgagagtttgagaaaaatgtgtattctgctgttgttggataaagtagtctatagatgtcagttatatccagttgattgatggtattgttgagttccactatattcttaactggttttctgcctgctggatctgtccatttctgatagagcagtgtcaaagtctccagttatgatagtgaatttatctctttcttcttgctgttctatcagcttttgcctcatgtaatttgacactctgttgatagacatataacacattgatgattgttatgtcctcttggagaattgatccttttatcagttatgtaatgcccttttttatccctggtaactttccttgctttgaagtttgctcgtctgaaattaatatagctacttctgctttcttttgattattgttatggtatatttttttccatccatctacttttcatctatatgtgtctttatatttaatgtgagtttcttatagaaaaaatatagttgggtcttttttcttgattcactcaatctctgtttttaaattggtccatttagacttgtgacattcaaagtgattgttgatatagctgaattaatattaccatatttgttgttgttttcttttgttgcctatattcttgttcctatttttgtcttccattctttttctgtcttttgtggttttaactgatcatttaatgtgatttcattttctctcctttcttagcagattgtttatacttttttttttgctttttatagtgtttgtctacttttttccttttttttagtgtttgccctagagttttaaatatttatttacatttctgagaaaattaaaaataaaaccaccagctgggcacggtggctaatgcctataatctcagcactttgagaggccaaggcgggtggatcaactgaggtcaggaattcgagaccagcctggcgaacatggcaaaaccccgtctctactaaaaatgcaaaaaattagccaggtgtggcggcaggcacctgtaatcccagctacttgggaggctgaggtgggagaatcgcttgaacccaggaggcagaggttgcagtgagccaagatcgcaccattgcagttcagcctgggcgacagagtgagactctgtcttaagaaaccaaaataaaataaaactacctttacaatccagcaattccactagtaggtatatatctaaaggaagtgaaatcattatttagtagaggtatctgcattctcatgttcattgcagcattattcataagagccaagatatggaatcaacctaagtgtctaacaatggataaagaaagataatatggtatgtataaacaatggaatactatttagccttacaaaaggaagaaatcctgtcatttggaacaacatagataattgatggttggaggatcttgtattaagtgaaattagcccaggcacagaaagaataccacatgatatcacttatatgtggaatccagaaaagctgagtgcatggaagtagagaatagaatggtggttaccagcagctagggagatctttgtcaaaggatacaacatttcagttagatgggaggaataagttaaagagatttatggtacaacatagtgactgtagttaataatgtattttcaaaaaatctctaaaagaatagattttaactgttctcaacacagaaaattaaaagtatgtgaggtaatgcttatatgttaattagctggttttagccattctacagcatatacttacttcaaaacaccatgttgaacaccataaatatatgcagtttttgtcaattaaaaaataaaatttttatgaaaggaacttcaaatgctaaatgaggaatcctgcctgtaaatcatgctctatgattccataagacattctggaaaaagacaactttggaagcagtaaagattagtgcttgctacccagaggaaaagaagtcatacgaaaaagatacttgcacacacgtttatagcagcaccattcacaattgcaaaatcttgggaccaacccaaatgcccatcagtcaacgagtggataaagaaattgtgctatgtatatatgatggaatactactcagccataaaaaggaatgaattaacggcattcatagtgacctagatgagattggagactattactcgaagtgaagtaactcaggaatgcaaaaccaaatatcgtatgttctcactgatatgtgggagccaaactatgagtacgcaaaggcataagaatgatacagtggactttggggacttgaggggaatgattggaggggtgcaagggataaaagactacaaatagggtgcagtgtatactgcttgggggatgggtgcaccaaaatcttacacatcaccatcaaagagcttactcatgtaactaaacaccacctgtaccccaataacctataacctatgggggaaaaaaagattggtggttgccagaaggttgtgaaggggtgaatgggtggagcacagcggatttgtggggcagtgaacctattctgtctgttaccatattggtggatacataacattttatctgctaaggccatagaattgtatagcacaaacagtgaaccctaatgtgaactctggacttcgttaatagtaatgtatgaatattgctttatcagttgtaacaaatgtaccacactaatgcattcctgtaatatgttaatattagaggaaactgaaaaagagaaggggacagggagtatatagtaaatttgtgtaccctattcggtttttctgtaaacctaaaactgttctaaaaaataaagtctattaataaaaacatgaaaaaagaaatatactcacagtttatccaagtcccctttcaaatcacagcataccacttcacggggggtgtaaaataccttataataacaaaataatcctaattccttcctcctgttacgtctatcattgctgttattcattttgtgcatatatatgtatacatacacacacaccagtacacatacagacaagcatatgttactgaatatattgttgctgttattattttgaacaaatttatttgttagatcagttaagaacatgaaaataacagtttttgttttactttcacttatttcctctatttctatttttgcaagaaacatcattggagttacagggtttgcattgactctaggttgttttgggtaatggtcattttaacaatactaagtcttccagtctaataacaagggactgggttccatttacttatgtcttctttaattccttttagcagtgttttgtagtttttattagatgtctctttcaattaagttaattcctaaatgttctttttgatgttattgtaaatggaattgtttttgtaattttcattttagattgtttatttttagtgtatagaaatataattgacttttgagtgttgactttgtatgccgcaattttgcctaacttattctaatacattttttgggaggtgggatctttaggattgtctacataaaagatcataaatcacttatggacaaagatagttttatttattttttattatctaatttctctggctagaacttccagtgctatgttgactagaagtggcacaagccttttcttgttctttatcttagcggaaaaacttttagactttcactattgagtatgatattcacgtgggtgtttcacatatgtagtttattacgttgaggtggttttcttttactcctggtttgttcagtgttttctttttgtaaatcatgaaagagtgttgaggcagggcacggtggctcacgcctataatcccagcactttgggaggctgaggtgggcggatcacctgaggtcaggagtttgtgaccagccaggtcaacatggtgaaaccccatctcttctaaaaatacaaaaattagccgagtgtggtggcaggcagctgtaatcccagctgctagggaggctgaggcaggagaatctgttgaatccgggaggtggaggttgcagtgagctgagattgcaccactgtactccagcctgggtgacagagcaagactttgtctcaaaaaaaaaaaaaaaaaaaaagattgttgaattttgtgaaatgtgttttctccctcaattgaaatgattatgtgttgcttacctttattctgttaatgtggtttaatacagcgattgatttgcacatgttttaccatccttggattctaggaataaatcatacttggtcatgatgtggaaaccttttaatatactgctgatttcagtttgctagtaatttgttgagaatctttctgttaattttcagaagtgaaactggttgatagttgttttctcgtacagtcacctgcccttacctgtagttttgctttctacaatttcagttgcccgcagtcaaccagggtctgaaaatattacatacaataaggtattttgaaagagagagagagaccatattcatatagcttctattaaagtatattgtataattgttcttataattcttttttttttttttttgacatgaagtctcgctgttgtcccccaggctggagtgcaatggcacgattacggctcactgcaacctctgcctcccgggttcaagcgattctcctgccttagcctcccgaatagctgggattacaggtgcctgccgccacgcctggctaatttttgtatttttagtagagatggggattcaccatgttggccaggctggtctcgacctcctgacctcaggggatctgcccgccttggcctcccaaagtgctgggattacaggcatgagccactgctcccggcctgttcttattattcttaatttttactgttgcttagtttataaattgaactttatcatagatatgtatgtataggaaaaaacataatatatatataggattcagtactctccatggtttcaggtaaccactggggtcttggaatgtatttcctgaggataagaggggactaccgtgatgtctttatctgtccttggtatcagggtaatgctggcctcatagaatgagttaggaggtgttccttcctcttcagttttctagagaagtatgagaatgattgatgttattgaaatatttggtagaactcaccagtgaagccattaggtaaagagcttttctatgtcaggaaagttttggttactgaatcaatctctttactaattgtaggtctatttatattttctggttttttgtgtgagttagtcttggtagattttgtgtttctaggaatttgtctgttttatctaagttattctatttgttaacatagaattggtcagagtactctcttaatcattttaattttcgtaaagtgggtagtaatgtccccacttttatttctgattttaataatttgagcattctctgttttttttattagtccatctagccagaggtttgtgactcttttggattgtttcaaagaaccaacttttggtttcattgattttgttgttgttgttgttgttgttgtgttctctgttttatctttgctctaatctttattatttccttgcttctgatggctttgggtttagtttgtttttctctttctagtttcttaaattgtaaagtttcgtttttaatttcagatcattctcgtttttttaatgtaagcatttatagctataaatttctcccatatactacttttgctgtattccgttaagttttttgttgtgttgttttcatttgtctctggagtatttcctaatttcccttctgatttcttatatgattcgttggttatttgtgtgttgtttaatttccatgtttttgtggattttctcattgtagttattttatcgaagtctttttttttttttttgagatggagtcttgctctgtcacccaggttagagtgcagtggcgcgacctcggctcactgccagctccacctcccgggttcacgccattctcctgcctcagcctcctgtcttttatcgatttctgacttcatcccattgtggttggaaaatatactttgtatgtctatctttttaaatcttttgagacttagtctgtggcctgacatatgatctgttttggaaaatgtcccatgtgcacttgagaatattatatatgttattatgtgttctgtatatatccctaagatctagttagtttattgtgttaagtcctctgtttctttactgtatttccatactccattctattaagtgataatagagaatgaaagtctccaactattattatagagctgtctatttctccctcagttctgtttttgcatcatatattttgatggtctgttactaggtctataaatgtttgtaattgctgtgtcttcttactgtgttgaaacttttattaagatataatgtttttttttgtttcctgtaacctttattgatttaaagtgtatttggtctgatattagtatagccacttctgctctcttttggttactatttccatccttccactatcaatcagtttgtgtctttggatctaaagtgattatcttatggacaatgcatagatggatcttttttttaattcattctgccaatctctgtcttttgattggagagtttaactcacttacattgaatgtcattactgggaagaagaatttatttctgttattttgctatttgttttctatatgttgtaaagctttttttttttttttttttttgacccttatttcctgcatttctcttggcttttgtgttcagttcattttcttatagtggtatgtttacattctttctcaatttgtttagtatgtattctgttttctttgtagataccataggcattacatttaacatcctaaacttataaaaattcagatgtcaatttataccagcttagcttcaagaatatacagtaactcttgctcttttttttttttttttttgagacagagtcttgctctgtcgcccaggctggagtgcagtggcaccatcttggctcactgtaacctctgtctcccgtgttcaagtgatttccctgcctcagcctcccgagtagctggggttacaggtgcccatcaccgtgcctggctaattttggtatttttagtggagaccatgttggcaaggctggtctcaaactcctgacctcaaatgatccacctgcctcggcctcccaaagtgctagggttataggcgtgaaccactgcagccggccagctctgcttctttaacagctctgccctcaccctttccagttgctgtcacagaattacctccttattcattatgtgccccaaaccataaactaatcactttaaatgcatcaattttttatatagaacaaaatgggtttatgaaacaaagtttcaataatactagcttttagattaataatttaaaaatatgtattggccttttaaatcatgtagaaagcaaaaagtgcaattataatccattattacagtaatactggactttataattgtgtgtgtatttacctttattgagatttttatttcttcacatgacttcaacttactgtttaaacagtgtgttttcatttcaccctgtaggacttcattgaccatttcttgcaggtcaggtctactggtaacaagctcccttaatttttgtttatctgttaatgtcttaactttcctgtcagtttagggaaaacacaacaaccaaaaaacccagtcaaacaataacaaagctttgtcactttccaaggcagtcctttcctcagatctgctccaaatgaacctttcaattctactttttttttttttttttgagatggagtctcgttctgtctcccaggctggagtgcagtggtgtgatctctgctcactgcaagctccgcctgtcgggttcacgccattctcctgcctcagcctcccgagtagctgggactacaggtgcccgccaccatgcccggctaatttttttagtagagacggggtttcaccgtgttagccaggatggtctcgatctcctgaccttgtgatccgcccgcctctgcctcccaaagtgctgggattacaggcgtgagccaccgcgcccagccccgaacctttcagtcctttcaacctcagatggcattgtttcaagttcccagagcaccataccccttgagtatatcctatcaatatgccctttaaaacagggcaacaggtttctggttgcacaagtaaggagcttggaaatcaccatccatcctaacaacaaataaaatgctgaagagactgaaaaaccaacagtgcttccgggatccaaaagacaggtgaggacaccaaacaaaccactgaccccaaactagagagacaaacaaatagccatggctataagatccaggattcataagcagaaattgccacgagaaccagtgctgaggtaggaaaacctgagctgtaactgacaaattgctgggggctaagtggtggtcaagtcagacagttaaaaacttgcaggggacccagttataggtgagcccccacacctttacagattttatatccaagagctcaaccagagtctcacagtgaatattggagaaaaatctcctcatgcttccaagaagattaaagggaaaggaacattttgaaatatgccacagcatttgcttcttaacaaggcctgccctccagatgtaaccagagcataatggaacttggggaaggttaatacacaactccagcccacactagccatcctatgactcagaagcacatttaaagttcacagtatagaggcataaggattcgctgagacctaatcataagactatagaacactgcccacaagattgtagaacctaaaactataggaaacattgcctcactctacaccttatattactaaagacctatttacagaagttccttttactcaatgcatcatgtcccgctatcaaggaaaaattacaaagcatactaaaaggcaggaaaaaagattttgaagagacagtaagcattagaagcaaacatggtaggaacactaaaattatcaaaccagcaatttaaaagaactttgattaatatgctaatggataaaatagcatgcatgaatagagtggtgatgtgagtagagagatagaaatcctaaggaacaagtgaaaataaattctagagatcaaaaacacttttaacagaaatgaaaagtgcctttgatagacttattgctagactgaacaaggttgataaaatatctctaagtttcaggatatatcaataggtacacccaaaactgaaagcatgtagagggaagactgaaaacatcagaacagaattatcacagaaccatggaaccactagaaaaggtgtaaaatatgtgtaatgggaatacaagaagaagaaaaaaacaacagaagaaacatttgaaataatagtgaaaattttacccaaattaatgtcagacaccaaaccacagatccagaaagcccaaagaacagaaagcagaataaatgtcttaaacgttagatttaggaatatcattttcaaactatagaaaaccaagcataagaaaaagcctgaaagccaagagaagaaaaagcctaacaaaccacactttacctatacaggaacaaagataagaattttatctgacttctcctcagaaaccatgcaagcaaaaagagtggaataaaatttttaaagtattgagaataaaaaagaaagcaaaattgcgaataaaaaagaaagcaaaattaccaatctagaattctgcactttaggaaattatccttcaaaagtgatggggtggctgggtgcagtagctcatacgtgtaatcctggcactttgggaggccaaggtggaaggattgcttgaggccaggagtttgagacaggcctgggcaacatagtgagaccccatctctacgagaaaattaaaaataattagccatatgtggtggcatgtgcctgtagtcccagctactctggaggctgaagtggcaggattgcttgagcctgggaggtcaaggctcctgtgagccatgatcataccactttactccagcctgggtgacagagcaagaccccatctcttaatgaaaaagcacacaaacacaaatgatggggagagagaggattctgaaaagagaggggagtaacaagcaagaggaatctctttcgttacctggacaacaatcacaccggcagaatatgtcttatatccgaagaaacaggaaaatgtatataggccattcaaagaaaacaaaaacaaatcaaaagaaaccgtccttgaaaaagacctgatggccaatatggccgatccattcaaaaaagattttttttttttttttgagatggagtcttgctctgtcacccacgctgcagtgcagtcgtgcagtcttggctcactgcaacctccacctcccggttcaagagagtctcgtgcctcagcctcctgagtagctagtattacaggcgcctgtcaccacacctggctagtttttgtgtttttagtagagatggggttttgccatgttggccaggctggtctcaaactcctgatctcaggtgatccgcctgcctcagcctcccaaagtgctgatattacaggcatgagccaccactactggccaaaacaaagactttaaaacagctatccaaaagatgctcaaagaactaaaggaagatgtagagaaagtcacgaaagtgatgtatgaccaatatgaaaatatcagtaaagagacagaaaacctaaaaagaaaccaaaaaatttctagagctgaaaagtacaataactgaaataaaaaacactaaaaggagtcaaaggggcagatttgagccggcagaagaatcagcaaacttgtatataggaaaatgaagattactgagtctgaggaacaaagaaaacagattgaaaagtgaacagagtctaaggggtatgagtaggacacattcaaatagaacaaaatatatactgtgggagtaacagaagaagaaagagacagaatatttgaatgggtgtaaactcccgaattttgatgaaagccatgaatatccaagaaagtcaacaaaatccaactaaaatgaacttgaactcaaggaaatctacaatgagaaatcttacggtcacacttgaaaattacaaagagaatttgaaagcagcaaaagagaagtgatttgtcacatacaaagaatcttcaatagattatgaatagatttctcatcaaatatttcagaggccaggagacagtgggccaatatattcaaagggctgatagaaaaaaagtcatctgtaaatgcagagacacacacacacacacacacacacacacacacacacacacagtgcaaaactgttaaatacacacacacacacacacacacaaggaaaaaacacacacacacagtaaaactgttacatccggagggctgaccttaagaagcgaatgctgtggcatatttcaaaatgttcctttccctttaaccctcttggaagtgtgaggggatttttctccaatatttactgtgagactctggttgagctcttggatataaaatctgtaaaggtgtggggtctcacctataactgggtccctttcaaagtttttaattttctgacttgaccaccacttagcccccagcaatttgtcagttacagctcaggtttcctacctcagcactggttcctgtggcaatttctgcttgtgaatcttggatcttgtagccatggctccctttatttgtttgtctctctagtttggggtcagtggtttgcttggtgtcctcccctgtcttttggatcccggaagcactgttggtttttcagtctcttcagcattttatttgttggtaggatggatggtgatttccaagctccttatctgtggaaccagaaacctgttgccctgtcttaaaaggcatattggggccaggcgcggtggctcacacctgtaatcccagcattttgggaggctgaggcgggcagatctcctgaggccaggagtttgagaccatcctggctcacacagtgaaaccccgtctctgctaaaaatataaaaaattagccgggcttggtggcgtgcacctgtagtcccagcgagccgagatcgtgccactgcactccagcctgggtgacagggtgagactccatctcaaaaaaaaaaaaaaaaaaggcgtattgataggatatactcaaggggtatggcgctcaggggacttgaacaatgccgtctgaggttgagagaattgaaagtttcatttggggtacatttgaggagaggactgcctcagaaagcaatgaagctttgttattgttcggggtttttgttgttgtttgtgttttttggtttttggttttttttttttgtatgtgaaaatggtgaagctttggcttttagaattttggtactgtggtcgggagagtgggagattagatgacatgacagttgagttatagaagagcctaaagatagggaaaatatatagtagttgaatcctagctcttccattttctaactcagagatcgtggtgaccacaggcgtgagtctttctgagttcccacctatagcatagagataattatacctatcttatgggagtcattatgggggattaataatataaataagcctggtcaaagtgcttcctaagggttaattgtattattgcctattggtatatagattcatgctgtaaatattttaaacagatgcattgtttctgcatacctgtgtagttatggaagagatacagaatttggagttgaaatttggaaggaatatgacagaccttgatttatcatgtcttaatggcaggatattcactgtactgtgttaatttgatcattacaatttaatatgttaaaggaaagagaagaaaaaggaagatgtataaataaagaaggcttttatttttgtttttatcattaatttttcatctcaaaatttgttttggctacaaaatatgcagaaagaaagtcttaatttttagaaatgaaaaatattttaacattccattaatctgatgacctgacccaagagtttatagcatgtttgttttagctttaattcttggttctgttttactttatgtagagattctttaaaataaggataagaatccaaaggagaagtgcaggtgcttctttcatagccttttaaagttgattcgtatacagtaaataaattagtatggcggatatgtgtggactgttccacatttggcacatctttatgagtatgtttttgtagacatttgaagaaagttttataatagttggtgcaaatttgtccttttatgtgaaatactttttcatttcaagttaaaaatgcattaccacagaggatctgccaatttctacagatagaattctcattgtacaagtaactttagtatgtcacagtaggtattgcacagtacagtcatgcgcagcattatggtgttttggtaaatgatagactgcatatatgtcagtggtccccaaagactataatggagctgaaaaattccttttacctagtaatgtcagctgtcttaaggtcatagccatcttaatgccgtagttccaacacattactcatgcaactcaatagtgagaaaagaaacaagcccaacaaaccaccatggacatatttctgaaaaaagtgacacctcctcaagaagtacctcaggcaggtccctcaggagggattccaggagaaggcattgttaccataggaaatgccagctccattcatgttatttcgcctgaaaaccttttagtgggacaagatgtagaggtggaagacagtgatatttatgatcctgaccctctgtaggcctatgctagtgggcgtgcgtgttttagttttcaataagaaagctttaaaaatctaaaaatagaaaaaggaccacaggtgtgtaccgccatacatggctagttttgaattttttttttttttgtagaaacaaggtcccccagtgttgcccacacttgtctctaactcctggcctcaagcagtcctcctgctttggcctcctaaattgctgggattacaggtgtgagtaatcctgcaatcccactgtgtaatccccctgcttacttcttattcctaagaaaaatgttaagtgacattaaattttttcctggtcgctgttttattttaaactatggaatttaatatatgaatgcattctcattcacagaggtctaaattgcttagaattaggtggaaaaacgtgttaaaacctccatttatcatgtttctttctccctattaccattttcaaacataaaggtaaccaccctttttgtatcgtttcactgcttggtgatttacagacatttggagactgttgcaaaactaatgttgaattattttcagtgggtatttatattttctcctaatcattttcattctaggaaagtttaaaacttttcgctattgagttatgaaaatttcccttgaaattaagaattatgtaaatgatgaatatgttcacagtagaataatgagaaaataagccaacgttatatttttaaaattcacctgtagtgttagaattgagagagaactactcttattaatttgatatctagatttccaacttgcccatttctgaagataaatgtaatatatttaagtcttaaaggatcattatatacatagttttgtaatttgtgttttttaatgtagtaataaatggtagcatacactcttttagcagttgtaacatgccaggcagacttttaatccatttgtatttagtaacgtaggtcttcacaacagtcctttcaggtaagtattattactattatgcccattgtacagatgggaaaattaaactcacgtagttaggataaataacccccaaagttcacatagctgctaagtggttgaaatgagatttgaatttaggcagaggattccagagtgtgttctctttgacatatggtcataaccatctttccatgtcaataaatatagacttcacctgtacttgtattggctgtatagtatttcactttcatctcactcaaactcttagtaatattcacatatcttcatttcttgaaaggattttttctttacaggctcttccttctaagtttccttcatggttcattctctacctgacttctaaatttgtagtttccaatggccaggctctttgtttatttgccttcttaaggtaagctcatgcattcctgtgactttaaatacagtttatataatggcaatgctcaaatttacagttactgctcggaactttctactttgctccccaactcatatccacagtggcttatttgacatcttcatgaagatgtgtcatagatctctaaaatgtgtgaaatcagaatgtttgattccctctctaactttgttcttcctccacaaatctgttccttctctttctgatcgtagtaaatggctcttgcatcaacctagttgttcaagtcaaaaaattaggagtcatcactgattactcttttttctgtcaactcttatagttaatttttcagtaagtcctgtttctgctttcataatatttctccagtccatccacttttactgtcatcaccttcatcaggccactccatcgttatccagttatgtatgaacacctgctttgcattctattttccacttctgctaacagtgtttcaccattgttactattaatcttaggttgtgaagtgctgataaagacagtgtcaggactctgcttattacatctataaattcacactatccaagctcagttagactgacattactatttagcagaccatcttcctcctgcttgaaatatccttgcgttctcatgtattactcctatccccattcctggtttatgtgtagtggaattaagagtggagctttttagcatacatgtttttttttttttcatcttttttctttatttccccacctccttatattgagttagataaaaaatgggaattctacatctgatctgactaatataaactgctgtcaaggtgaccttataaaatatatttatgtactatctctgctgtatattcaatggatctttttccaaccaaatgaactatgaaaacttcatcctggccctccaggctgccttttaaggtgttgccaattaaaaaaaaaaaaactttaacccttatcttccactgagctattcattgtagtcaggctgctcatttcagagcatgctctttgttttttgtgtgtgtgtgtgtgtgtgtgtgtgtgccttgtgctatagtttatatatatactttgatttctttttttttttttaataatgtaaaactttggatgcaggaactgtgtctttcaagtacttttggcatttacatcagggattcatagctgttctacatagttcacttgtatcgggaagattatcttacttagtcaggaacacagttttggaggaatatctgtagagcagcaggaagaaaaggagaacccttactgtaggcatttgtcagttcaacccagacattggtaactaatgtgtgtgtgtgcaaccagatcatatctggagttagatttttcttgtctttcagtatgctgtatagcacagaaacttgaatgtagaaagttttcattgaagaattgactgtgatccttcctgatcactgggcttattgcttcctgggcatccactggcttttaatttagttttaagccaggcttttaaagtagaaccaaccaggaggcaaggatgttgggggcatgattttccaatgctactcatgtaaactcaactttttaattccttttttggaataaaacaggctcttcactgtttacagggttatttctaagttgcaaaaattatctctcaacatgtttttgtaatttctgtatcccccatttgatcttggctgccacaaacagaaaatgtgagaacattttttttgtgtatctatggtagaaacagtaactgctccaggtctgtcaagtagattcattggatcttcttataaaaataatatatttttgttaataaaaataaatttgaaaatttcaaatgaggtgttttacttagaatgatgttcaaaagtttttgtccataagtgtttgaggaggtccattttaggattttccaagtgtattagtctgttttcatgctgctaataaagacatacccgagactgggcaatttacaaaagaaagaagtttattggacttacagttccacgtggctggggaggcttcacaatcatggcagaaggcaaggagcagcaagtcacatcttacatggatggcagcaggcaaagagagcttgtgcaggaaaactccccccttataataaccattagatctcatgagacttactacttactatcatgagaacagcacaggaaagacctgccctcatgattcagttacctcccactgggtccctcccacaacatatgggaattcaagatgagatttgtttgggggcacagccacaccatatcaccatgtatgtctctggctacacttaggaatgtctcatctatttaagttttttttaagctctacatattagcttcagaaagtacaaataaaaataagaataaaaattaccaaagattttatcagttatgttataacccctgttaactttttgaccattatttatttttttgttctttgttttttttcatatgtatagccagttagatggtgtttttacactcatccacttttaaaattaaaaacaagggatgtagcaatcttttctatacaaagagaaacactgtaataggagcaacgtttttatcctttaggtactcatagactagtgacgggaaattcatgtcatactacataacagaatgagctaaattccatttgtctgtggtggagtcagctaacattttcattgaggatattctgtgtgctgaatatttatagccattatctcattttatctatgcaataactctatgatatgatgtagatgaagccattgaaatttagagattagataaattggccacatagttcataaacagctaggagtttgcccaggtttgttgacatttaaatccacgcttgctacttctttctttatttatttaagacagagtcttgctctgtgacccaggctggagtgcaatggcgtgatctcggatcactgcatcctccgtctcctgggttcctgggttgaagcgattctcctgcctcagcttcctgagtagctgggattacaggtgcctgccaccacgcccgcctaatttttgtatttttagtaaagacagggtttcaccatgttggtcaggctggtctcgaactgctgacctcatgatccgcccgcctcagcctcccaaagtgttgggattacaggcatgagccaccaagcccggcaaatccatgcttttaaacattactctgtatggtgtgataatgaacagtcactgtatctgactgttcatctgtgtgtccatctgtattgaataaaggagaaggagttgaagaataaagggaaatctacagagatgctgaggaaaataataataaaataacttggaaagagacatcctcaaaggataatcagtggaaaccagctttgctaaagtaatagcactttattgtggtacttgtaacatgactgctaatgaattataaaggtatggtatagatatttggcataaataagcttattgcctcttaatgtttgctctgtagattaagttatgtcaaagaccacaagctgatggttcccagctcttgatttatgagccaggaactgtcctgtcaaagcagtttaagtgaaattcaggccctatgaactagaacatgtagccaaaatattctaaagttttgtagatatcctacagatatatgattttgttgaattagtcagtttagcattgtgccagccactacgcagtctcacaaatgaaagtatgtgttatattcctaaaggagcgtatgaagtagacatgttcacaagtaatagattattttaagtgctatggaaacacatagaggggagcatttttgcatgaagaatcaccaaaagtgaagtcagtcagcatttttctcatattcaaaagccatcttatgcctatcttgtgtgattttattttatataaatgaatatctttttccttctaggtatatttgtttttctgtttagttatctcatatgtaaatgctagtttaaatatttaactgttttctaccagctgacaaatatattttagcttctgttgatatctttataacagaagtttaaaaactgttcttgtcatgttctgagtcaagcataggtaataatactgtataaattaaaattggctcttaatgttgtatggattgctttctctaatgaagttaggaagcattcaaaatttgatttgttcttaaagtaagtgaagatttgaagagtggtgtaaatatatatagaagaaggactatgttagcacaactcctttttttttttttttttttttggagacagagtctcgctctgtcacccaggctggagtgcaatggtgtgatctcagctcactgcaacctctacctcccaggttcaagcaattctcctgcctcagcctcctgagtagctggaatcacaggcacctgccaccacacccagctaatttttgtgtttttagtagagatggggtttcgccatgttggccacactggtctggaactcctgacctcagatgatacacctgcctcagcctcccaaagtgctgggattacaggcgtgagccaccacacccggcctaagcaacttctttttaacactgttgacatattttaaactatatttaacaacattgctggaatgactatttgagataacctgctaattgaacacaaatcagttgaaaatctagtctatctgctgtaagagggttttctagtttcaagtctaggataattcattccttaaattcccactccccacctgtgttttcatagtcctttcctgtgcatttattttcagtattctataaattttacaacagtatacaaatcaaaggaattgttactccagcttggtcatttaatataaaagatggatgtaagccatgattcttgtcattacttacttggctctttgcatttaggattcttgttatatacagttactgtatatcaatccttcaaatttcaaaaaattttttttacaagaaaagtatattttaaagataaaattaatccaaaagtagtgccaaataggactgcttattagtatagatttatgtatcactaaggaaattactaattaatacttttacacaatttaaaaatatataaacaccgttagctacataaacttatttagacctaacaacaaccttatgatgggtattatgatactagctttatagattgcaaaactgagtctcagagaggtcaaatgacctgcccaaggagaaagaattaagtggcagagcaggacctgaaacccatatttgtatgattttgaatccagaagtattttaattacttacacttaatcggtagcttccagagtgcttatgaatgttttattttggcttaaacatttgtcttgcaattccatttacagtatatgatatgcaaacactgatttgtatagttaatgcaaagataacttcagtctggtctttaccctagtgatcaccaactagggaaaagtcatccatttaaatgaggctctagagcagcttttcccaaagtgtgaggtatgctagtgtaggtatcaaaggaatatttattattttaatgtaattctcagcctaaaaggccatcagccctcagaccaaccaacaacaggtttattctagattttatgtagtgaagcctaaatctcccttaaaagctcaaactttcttttcccctgtcctcacttctcttgaagctctttgtctagctccttcccctctgggcacatgcagtcccctcataatttcctccagtctgtcacccttgcctttcctatatttgactcttcatacttcttcagtaatccaactcttcctcctcagctccaactctttcccttttcagttttcttttttttttaatccctttccaggatccacacatcaaacaccagtgtcctctttaccccttgggttcttcataacactttcacatataccttagccctagacttatcctacctcccatcctatcacagctccttctccactcaactgcattcacaacccaccctaactccttaacccgtgactaacagaaataacctgctcaacaaaatctgtagtatgaagtgtctttctcaccaaaccaaggtctaactggttccaggattgggaggtcttgtttttttccccttggctgtctcataactgaactccataggctctctccacacttttaaatgttttctacacttttgtgcttattcactgttgctaagcttacattctacagttttggtgattcagaatgttctgggattcacgaataatatggggaacattttaaaaaagaattaactaagagcagttgacaaagcctcctgccttgaaaggagattttggcttacaaaggaccactgttaaatcagattggacagcaggtgatatcaaagaaatacgcaggtagtaagggtatgagacaaaacttctaatgcatgaagtttgggaaatactgctctagagtatttggaattcgaatttattcattcagtcagtcacttattcactcatgcattcaccatgtcgtcattatattaagcatctactctgtaccaagcattgggctggctatgcagtagtatgacaaaaattcagtttcagccctcatggagtttcctgtgtaagggaagggagattccatgtgcttttatgaaaagcagagtttttgtttcttaaaaaaaaaagttcctccttaaacagattttaaaaatataactgaagtgacaaaaatacactttctgtaaataacatctggtagatgtgttaccactcagaatttctattatgataaataaatgtaccaaacctggtgtcagaaatcactgtgggccaggttagaaaaacaaacacttttcacttgagaatacatcactccattattcagtattataaaatgaagaaaaatcactattactgctctagttagtaaatgaaagtgtatttgcttattacaaatgttggtttgatttcgaatctcctgaagtacctatctcctgagatgctggctgagctttaaggacagcttgcaacactggatcttcccatgggccgccatctctaatgattcgagtcaccagttccagattcacatttccatatctgcggaggtgattctggtattcctggaatgatccaagaatatcctttaagggctcttcataaaactcacctcttccaaagaacagcagcaactcgaagaaactcacagcaaggctactcaaaacatgttgtacgtgctcacattcatctgggaatgatgcactggctgttgtaaaacaacaaagtacagtctgaagaacctgaagctgtggcaaagggacctgccatcttccaacgtaatcttcaaccacctgacagaagcgtcagcagtaaccccgacagctgatcgtgacgccgccactgcagctgccagcaccgcctctgccgtcgcccgcagctctaagccccacagggcccagcagggactccacagtggccacaagctcttctctgaggcgttcggccttttgatcgctgtcttcctccgccatgaggctctcgctgcccagcgcataccagcccctgctcctccaccactgtagctgcctaggctaacctcccaaatttcaaaatattttaaaatgagaagtgatgtaatctattaatataatctttgtaattataatttgtttaggcagtttttattttgggctatattttctttatatccatactgatgttttgtttgcttgttctatcaaatactgagagtccctagcctactatccctgcattaaaaattttggtcggggtgaccttggagcgtaattcaacctccgaacaacctaaactaagaccatggggtattaatatttccaactgaaggtatagatttgtccgtttctttcttagtcctgttagtttttatgttattaattttcaggctcatttattgaagatgcatacgtaattagaatggttatgcctccgtaatggattaccccttttatctaaattaccttatctcttataatactctttgccttgaagtctgctttattatttatataccaacttttttacccttgcagtttgcatggtagatctttctccattcatttgttttcaactcatttgaactcataattaaactatataacttatgtatatatttatatataatatgtatattagatatatgtattagtccgttctcacattgctgtaaagaactacctgagagactggataattcataaaagaggtttaattgactcacagttctgcaggccgtacaggaagcgtggctgggcaggcctcaggaaatttacaatcatggcagaaggtgaaagggaagcaagcacgtcttacgtggccagagaaggaagacgagaacaaagagggagaatgccatatacttttaacaaccagatctcatgagaactcactatcaggagaacaacaagggggaagtccctccccgtgatccagtcacctcccactaggcccttccctccaacactgggaattacaatttgacctgaaatttgggtgggggcacaaatccaaaccatatcaatatataattattatatataagtatgtgaactataattgctttttaatcagtttttataatttatgtttattaattggagtatttaatccatttataattacacatattttagactgtttaaaatggtattggaatcccctgagtctcttcagtttcatttattcattttgtctttatttttcagattgatttgtgttcaagttcactgacttccatatagtttccttttttttttttttttttttttttttgagatggagtcatactctctcatccagactggagtgcatggagtgcagtggcaccatctcggctcactgcaacccctgcctcccaggtttaagcaattcccctgcctcagcctcccgagtagctgagattacaggcacatgccaccatgcctggctaatttttgtatttttagtagagacggggtttcaccatgttggccaggctggtctcgaactcctgacctcaagtgatccgctcacctcagcctcccaaagtgctgggatcacaggtgtgagccactgcacccggcctagtttccatttttctgttgatatttacttctattcactcattaagactatattttatttctttaatatattttcccttagttctttgaacatatttataagagctatttttaagtatttgtcagttgaatctaacatcttttggggccattttctattgactgcttttttcttgatgatgagtcgcattttcctttttgcctatctagtaatttttaaattatatactgtaccttgtggatgtatggtagagactctggggttttgttatttttctttgaatactattgattttcattctgataggctgtccagttacttgctgttcatccttaactcttgcaggctgttttatactttgtaaatgtagatgtgtggaaagatcaagatgtttcccaagtttttttttttttttttttgagatggggtctcgctctttcccccaggctggagtgcagtggcgcaatctccgctcactgcaagctccgcctcctgggttcatgccattctcctgcctcagcctcccaagtagctgggactacaggtgcccgccaccatgcctggctaattttttgtatttttagtagagacggggtttcaccgtgttagccaggatggtctcaatctcctgacctcatgatctgcccgcctcagcctcccaaagtgcagggattacaggcgtgagccactgcgcccggcccccaagttcttttaaatttgtagggtacaacctccaaactgtgtttccctttggatcttttaaggtttaatgttaggttttgttaggtttgtgctagagtaggtcttactttagagcctggttctttttcataagatgtgtcagctgaacgaccaagaaattagccaggtttctctacctttttttttttttttttttttttttttttaagagacagggtctcactgttgcctaggctgtctcaaactcttgggcttaagcagtcctcctgcctcagcttcccaaagtgctgggattacaggcgtgagccaccacacctgcccttctctacttttgcttgtctggaaatcctgtgttcttccaatgccacttaacctccagtgtttatgttttaccataaccccaaagcagttggtctctaataaacctggactgctttctctctgggtagcccagcctttagccaagtacacacatgtgacttctagggatctccctctccttgctttccagtgtcctgcccagaataatttagctgcttcatttgtcttaaactctgatctctgcctcctcaactcagcagaaacatgcaattatatgctgcacactggttgcaatattgacttttatcagagtttctgggcaattatggggttgacttggtgagtttctcttctctcaggaattacagtcttgtgtttattttacgaaacctgaatacggttgccttgtgtgttttgtcatttttgatggttgtttacaatgggagggctagctggtaccaattacttcatcatagccagaagtgcatgattctgagtaataagtatacaaatgtattgtgtcatgctgggacttatttgtattttccattagtgatttgttcaaacccactcccctaataaaattttgtacctggcttttattggagggggagcaaaactttctctattaaagaggcgtagcattttatgattttctaaaattttattgcattttatagagtatctgataagtgtcatggttcttccctgtctgctctggggaagacaccagcatatctttggtttaccttattttcatcaatataagtattagctgtacatgtggatagtatttgacaaaagatagctagaaatattagctgctgaatcttttttaaaactggaaattgatggtgtggccacttttaaaataaatttttgcagatattaattgagtcattaaatatttagtgagtgcctgttttattgccattgctggcattgtacttggcactagggatataatggagaacaaaataggcatgcataatccccatccttgttgaatttacattccactatgggagacaggcaataaatacaaagaaacaacatcaaaaattaccaattatgatacctaccaggaagaaaacaaatagggttctatggttgagaacagtgagttcttagttcagttagggtggtcagagaagacctctttgaggagttttatatttaaactgaatggataaggaggtagtgtccttatgggagaggttgaattaggtactatgatgggtttttaaatacctttccagtacccataaagatcctgaggaaagtttcgttatattagaggaactgagagaagataagtgtgtctgaagtatgaacaatgggaagaaaatgacaagatttaagtcgggaaggtggacataggctagatcatttaggaccctgtagacaatggtaaggtgcttgatttcttcttctttcttccatcgctgaatagggtaactatataatttgttgtacaaaaactggcatactctgagtaaaaaggagcaccaactggatggaatactgggtggacagatgtaatctagccctgtttggtaaaatcatcctaattgtgtacataacatatgtagaaataagtatagattctgcctgcagattacctttaaatattattattattattattattattattattattattatacttttaagttctgggatacatgcacggaacgtgcaggtttgttacataggtatacgtgtgccatggtggtttgctgcacccatcaacctgtcatctacatttctcctaatgctatccctcctctagcccctcaccccgtgacaggcactggtgtgtgatgttccactccctgtgtccacgtgttctcattgttcaactcccacttatgagtgggaacctgcggtgtttggttttctgttcctgtgttaatttgctgagagtgatggtttccagcttcatccatgtccctgcagaggacatgaactcatccttttttatggctgcatagtattccatggtgtatatgtgccacattttgtttatccagtctatcactgatgggcatttgtgttggttccaagtctttgctgttgtgaacagtgctgcaataaacatacgtgtgcatgtgtcttcatagtagaatgatttataatcctttgggtatatacccagtaatgggattgctgggtcaaatggtatttctggttctagatcttttttttttttttcacccaggctggagtgcaatggcgtgatcttggctggctgcagcctcagccacccgggttcaagccattctcctgcctcagtctcccaggtacctgggattacaggtgtgcaccaccatgccaagctaatttttgtatttttggtagaaacggggtttcaccatgttggccaggctggtctcgaacgcctgacttcaggtgatccacccacctcagcctcccaaagtgctgggtttacaggcgtgagccaccatgcctggcctctggttctatatccttgagcagttgccacactgtcttccacagtggtttaactaatttacgctcccaccaacagcataaaggtgttctatttctccacatcctctccagcatctattgtttcctgactttttaatgattgccattctaactggcatgaggtggtatctcattctggttttgatttgcatttctctaatgaccagtgatgatgagctttttttcatgtttgttggctgcataaatgtcttcttttgagaggtgtctgttcatatcctttgcccactttttgatggagttgtttgtttttttcttgtaaatttgtttaagttccttgtagattctggttattagccctttgtcagctggatagattgcaaaaattttctcccattctgtaggttgcctgttcactctgatgatagtttcttttgttgtgcagaagctctttagtttaattagatcctatttgtcagttttggctttgttgccattccttttggtgtttttgtcatgaagtctttgcccatgcttgtgtcctgaatggtattgcctaggttttcttctagagtttttatggttttaggtcttacatttaagtctctaatccatcttgagttaattctgcttactatctatatagcccttgggcagtttgatgtctctgtgcctcagatttcccatttgtagtatggggaaataatacctcactgggaatgaagattaagtaagataatatatgtatcaaaacacacagtgcctggcacatgccaagtacttagtaaatctgttctttcagcagatatttattgaaaggttattatgtgccagacattatactaggcaatggggattaaacattgaaccaaacacagaaatccttgacttcattgggtttatattctggtgctgagaaataggtgataaataagttaaaaatgggatgtaagatggtaataagtacgatgaagcaaaaacatgacacagagaatggaatatggaatatgctggcagcagaaggggatggtgagctaatatgtaatatgctggcagcagaagggaatagtgagctgaaagtttaagtagattgatcagagtagacctcattgagaaggtatgatttgaacagggatttaaggaagtgagggattgagccagctacaggaggtgattccaggcagagggaacatgcagagatgatatgggaagtagttagggggttttaagcagaggaatgacaggaaatggtttatattctagaaggatgactaggctgtggataagagagagtgacagcagggaaacaagttgggaattgaaataaaatatgttgaaccagggtggtatcagtggaggtagttagaaatggttggattctgaaacttcttgaaggtagaactgacaggatttgctgataaatttgataagttgtttgagagaaaaagaggtgccagaggtttttttagctagagcaactagaaggatgaagctaccattttaccatttactgaaacggggaataactgtgggaggaataaattcgggtgaagattaggagtttcagttttaggcatcctattagacatccaagtattcgtgttagcagttgttacttatctaataaatgttaactgttataatcattcattaaatatttattggctctctggtgaacaatttgctatgttcttggaattaaaagggtggtcaaaaatagacaatcttcttgcctttatgaaatttgcagtctaattggaaacatagaaattggtcaaatgacctcatcattggtagtatttttttcctaaaacacaaacaaacaaaaaaaccctttaattagggcacctaaagagaaataagagtgacttaacaaaatcataggtatcccttgatatctaaatttattaggttcttacgggcagatagtgagggatgtgtatacattgatctttcagactacttacataaatggttttttttcagtagacatatattttaagtttcttatttaacaatatctcattcttaaagttggttagcttaattaatatgagagaatgaagcttcacgaatttaccttcatttagttgaaatgagagagttgtatattgaatttagtgtttaaaagtattacatatttcatgaaatacttaggttgttagaaatgttctcctttgtttctttcattaaaaatgttttgcttttactttttattagctaaggaccatttttttgtaactgaagtctttaataatagcattatagtatcatctatttacctttctctcataacatgaaagtattaatttttgtgttttcaaaaatcaacaggttcgtcacaaggcatcgcagaaggtttatgctatgaagcttcttagtaagtttgaaatgataaaaagatcagattctgcctttttttgggaagaaagagatattatggcctttgccaatagcccctgggtggttcaggtaagcatactaacttttataagtttatttcctttttttatgagtgctttattattcatgagttgatttttgtgtgccaagtcttatgcttcatttacatggtaacagtgcagttatttttaggagatttgattcaaaacatttgtttaatgttccaaaacagtatgtccacatagatatgacatgtaatacttacttaaattgttgtatggaagcaagtattacttgcagctttttcttcttgataaagaattggcttgaataccagtatgccattgtttcatacccacttattcttgtgatttacatagtaggaacatagtaaattcattgaatcatctggaaggatatatacatattaatattccaacatggcacatgtgtacatatgtaacagacctgcacgttgtgcacatgtactctagaacttaaagtataatcattaaaaaaataaaaagtttgtgtggccaggcgcagtggctcacacctgtaatcccagcactttgggaggccaaggcaggtggatcacgaggtcaggagattgagaccatcgtggctaacacaatgaaaccctgtctctactaaaaatacaaaaaaattagccgggcatagtggcacacacctgtaatcccagctacttgggaggctgaggcaggagaatcgcttgaacctgggaggcagaggttgcagtgagccgagattgtaccactgcactccagcctggcaacagagcaagactccgtctaaaacaaaaaaagaagcttatgttacattaatcagcctatcttgaaaagaaaaaaaacaacaaaaaacttcctacaataaacatttagaaaattctacaatattgtggctcctaattttgccttttatttgactgtgggttaaggaatttatggttctgctttgccttcattctttcttttttttttttttttttttttgagatgaagtcttgctctgttgctcaggctggagtgcagtgttggaatctctgttcattccatcctctgcttcctgggttcaagcggttctcctgcctcagtctctcgaatagctgggactacaggcatctgccaccatgcctggctaatttttgcatttttagtagagatggggtttttgccatgttggccaggctggtcttgaactgctgacctcaagtgatgtgcctgccttagcctcccgaagtgctgggattacagatgtgagccaccgcacctggcctttgccttcgttactattatatttcttcactagctttgcttctgtaaacattttttttatactagtaagtaaatctgcagacatttttgaacaagtgtcctgagtaagattaggtatacaccagttcttgttcagaatgcttaaatgatctgggagtttgataccttgcttgtggaaggcagttcagattcccctccccccatccccccccaaaaaaaacccacttttgaccatgttatttagaagctcattaatgtcgcttttttataagattgatcctcattcctgctccctcccccactttttatttaaattgtaggcagtgaatagaaattctgatatgtacagtgaaactaaaacttctatggtaaattctataccatgataatttttttttttcccttgagacggagtctccctctgtcacccaggctggagttcagtggcgtgatcttcgctcattgcaacctccacctcctggattcaagcgattctcctgcctcagcctcccgagtagctgggattacaggtcctcactaccacacctggttaatttttgtatttttagtagagagacggggtctcaccatgttggccaggctggtctcgaactcctgacctcaagtgatctgcctgccttggccccccaaagtgctgggattacaggcatgagcctctgcgcctggcctgcataccatgataatttatctgattaaagaatgattgcagtaaagtatttgtttcacttttagctttaaattgctttcatagtagcggattgccatttctggttatttcataaattgatattctttgatctttaattctgctatgtgaacctttataaagtgttaattgagatagaagaaaatctgctgattattgaagtaattgagataatggatctgagggagcaaaccaatagtgaaacatagtacaattgaaaaagtaaatccgattataattgtggcctttatatgcttatctctctgggtaaagaacaacattccatgcaccattatatttatgtgtataaaatgtttgaccttttgtgaaaacttgtcaaagtgactgacttatttttatttattgttttattcaatgattttgaatattttcacagagttgtacaaccatcaccattacctaattttaggacatttttctcaccctccaaagaagccctggaccaattagcatttattcccccaattccacctgcccccctgcccctgccaactgctattctattttatgtctttatggatttgcctattctgaaagcttcctataaatcaatcacacaacatgtatgtatgtcttttgtgacatctttcacctagcctaatgttttgacattcattcattcatgttatagcatgtatcaacacttaatttcttattatggttaaatagtattctgttacatggttgtaccacacttcgttcattcatcacttaatggacatttgtgttgtttctcctttttgactataatgaataatgctgctttgagtgttctttcataaggattttggtacatatgttcacacatttcttttaggaatctacattgcagtgaaattaatgagtcattggatatgcctataattaattttattggactatttcagttttccaaatctcagctcttatttttaaatgactattaaatatttaattgtattaatacccccacagttactatacttttgttagaaatatcacttttcatttttgttaatataaattagccacagtaataggttaaatcttgggcctatctgtatttcttagaaatatattattagggtgatttctgaattcaatagataaatattgacatattttaaaaacttttattcatttgcgggtagagaggactttgtctttttaaagccatttatatatccagtttgctgtgtttttctagtgttgttatttttatggcaaatgcttccttgctttcctttgtagttttatcacccagatgtgtacccctaaacaccttagtttagttttggcattaaaaaaaaatttaagttcaggtatatcttttaaatctctcaatgtagagagtttccctcttctttcatttacttttgtccccaggttgaagaaacctagattttgctgatctcttcttgtggtgtagtttaacatgtttctctctcacttgtatttttgtaaattggttgttagatatagaggcttgatcagattcaggttccactttggaaggggacggtataggactacttcataggccaggttcataggccacctataagaagactaatgtctggttatctggtgtgttaccagctatttgtgctcagtgtcttgatatatcatttattaagatttgtcaaatgatacttcagttcaatcattcctccttggttatagtgactggaatacttctgtgaagaaaaatatttctctgtttacttgttaagttactcagggtgcagttcacactggaaggacaggataaatgctttattcttttattgtatttaccagttttcaaaataagggtgaccaattttgggggagaatcagtttgaactcatggacttaaaacctgtgtgatatgtttcagtcctttgaatatcttattgatgctcaaattgtggtacctttgaccagtgggatcagaatgaggttggtttctgaaacctttaacgaagccttaataatctttgatagcttgcttgcaatgtgatgtaacagggtgctccagacctatcttaaacatttgctgctcttgatgtgtaattaactgtgcttgtaggtctgtcttttatacatgtgtgagtttttctttacaatagattcctagcattgggattgctaggtcagatggtatgcacatttgacattttgattgatagcaccagattgctttgttaaaaaatttttctttacaagtttacattatctttgtacaatagatgttctctttcaccacagttttagcaaatacttgatattgtaactattttaaatttttactagttgcatgcttgagaaataaggtgttaactgtgttaagttgtacttccttgattacttacgagattcagcatctttcatatgcttattaataatttatattccttatacattaagcctaaaatataatttatatttttataaatttataatataattttataaataatacatgatttataatataatttatattttatacatcaagcaaagtataaggaatataaatttcattgctaatgtataaggaatataaattagtaagcaaatgaaatatgctaatcttttatagtgcactgaaaaagatttcaaagtagtgtaaaatttaaagtaaatgctatttgcaataatgtgatttttaaaagtgggatactgaatttgatttactaatattttgttaagtagttttgcatctatgtgcataatgagatttgacctttaatttaatttaattatttaaacatgggctcttggttttcttattacggtaagactactctaatagacataatagggaagcatactacttttttctgtgctttgatacagtttatataaaatataaactattcatttcatgaggcttgaatgaacttacttgcaaagctttctagaaaaaaattcttttttttttcttttttctagagacaggatctcactctgttgcccaggctgtatttagtacagtggcaaggtcatggctcactgcaccctcaaactcctgggcacaaacaatcctctcacctcagtttcccaagtagctggtactgcaggcatgtaccaccatgccctggctcatctttggtaaagattggggtctcactatgttgcccaggctggtctcgaactcctggcctcaagcattcctcctatctctgcttaccaaagcactgggattattatagacatgagccactgcacccagcctaatgatacatttttccattttaaaaatgtattatgataaatttcaaatatatcccaaagtagaagaaaaaagtatattgaatccccatgtacagttcacccagcttcaacaattaccaaccatggccaatctcatttcatttatgccaggaattgcaaacattttttggtaaagggccagatggtaaatatttaggctttgcaacctaagaggcaaagttgaagatattacataagtatttatataatgaggaaacaaatttctgcacagtttttattgataaaattcaagagataataaatacaattttaaaaatacaggtctactaatgacaagaatgaaattcttttctgaatgtttgctcaactggggtccacaattagtgtttcctgtcatcaaaattaagtgcaaatactcatctgttaatgctggtgtgtaaaaatattttacatgttcatctgtgaaaatgtcctttcacacagctaggtattgccacgtactataattatccactaacgtatgattgttttttaaagttgtagatttatagaaaaattgagcagacagtatagagttcctatctatccccaatacagttttccctgttattacaaatgtatgaatgaaccagtattgatacattaaactgaagtctttatttagatttttaaaatttttacctatgttctttgtttcaggatcccatccagaatgccacattacatttagttatcgtgtcttcctgggctcttcttggctgtgacagtttctcatactttccttgtttttgatgaccttgacagtttggaggagtacatgaattatactgtaggatgtggatgctcctctgtaggaatttgtctgatgtttttcttattaattatactaaggttatgggtttttgggagaaagactgcagagttaaagtgccattttcatgctgtcatatcaggagtacatactaatacattatttatgactgttaatgttgacctcaagcatataattttgatttaccatatttatcacttggagaaggcgttttcagaaaattttaaaattcttcttttgatagttacaggttaatcatttctaattgaagattagatagaagaagccccttgattggaaagttcaaatagattttgaaatatggatatttccattgcgcttacatttgggccaaaaatgctgctgcaaaatgaggaaattaacattgatacattactgattaatattcagatcccaatcaggttttcaccagttgtcccagtaatgtcttttatagcaggaggatccagtttcaaaccacatcacatttattttctttcagttttgaacatttcctcagtcttcccttgactcctcaacctttttggctgttatatcccccactaggctgcccctttgcttggatgtcctttggaccctgtttgtgttaccaaccacaggttcctagggtcccaggcactagaaagtgaaatgaggcaagaaagtgtcccagacaaggctttattcatggctgatgttagaacacaaaggagagcactagagagagagttctccagctggctccctgaggacaggtctttttgttgttttaagaaccatgatgacataaataagcatgagatacttgaatgtcattacatgtgcagggtggagcacaaggtgtgcaggcgcagtgagaaatcatggtagtacacacatggcatgataacaaaatggtgaataagctcctccctgggtggggagtttagtattgtaaggaggcaaggggtggagattagccattcttctggtcttatgcacatatgggcgataggattaactcccttgagtaagatttaaggtgggatgctgtgtattttagtttcttcaagatcatacttcagtgagtgtggcacttgataagatttagggtgggattctgcttatcttggtttcctcaaattccagccatcatctggaaggaaggtcaaggtaggggtagaatcccgtccctcctctctcacttgggctttggtatcccatggcacccatcctcacacgtgaatggtcctccttccctttctgagctctgataccctctgtgcggcttgacttctgactccttttatagtatgttttgatgaatagtaattcataattttaatgcagtaaaagtttaatcaaacttttatggttaatggccttttgtgttcagtaaaatttgtccctaccttgagagcatgaagatattgtgctatgttacctttctgacttttattttttccctattaatctgtcctatcatggtccattagggctcctataacaaaatactatgaaccaggtagcttataaacaacagaaatttatttcccaaagttctggatgctgggaagtccaagatcaaagtcctggcagatttgttgtctggtgagaatccactttgttatatatggcaccttgtctctgtgtcctcacacagtagaagggggtgaataagctcccttgggcctattttacaagggcagtaaacccatttatgatggctgacttcatgttatgctaacaaggtggctcaagtgacctccatgacctactcattttcccaaaagccccttctcctaataccatcaccttaggatgacggtgttataccgtcattaagatttcatatgaattttgagggaacacaaaacattcagaccatagcacctatgatcagcccagaatggattttttaatagtgttacttaagtattcaattttacgtgtttccatatggatattcagttgttccaacattacatattgacaaaactttctgttccccactggtgtatgttaactccttatgttgtcatgcatttatccatctgtgcatagatctgttttggggttctgtgtctcactgcatcatttatctgttcttgccaccagtaacacaatactttaattagcttggcttaccttgcttggtatttattggagtttcttagaattatgggtttatagagttcatcaaacttggaggtagttaggccattatctctttaaatgttttttctgtctcagcttctgtctcctaagcccctatcccctttctcagacttcagttacacatgtgtaatctgcttgatgttgtcccataggtaactgatactctttttcccaccagtctttttttctttgcatgcttcattttgtatagtttttttgctatgtccttaagttcatggatcttctcttctacagtatctgctctaacttcagtcccattctatttggcttatttgactccacaaaattgttttgagattcatccatgatgtatatcaatatttcattccttttgattacttttattacatatatccttgtagggagatgtgacaatttatctgttcatctattaatggacattcaggttttttccagtttttctctcttataaataaaactacattattatttctggattaacttgattctttgaaagttgttgttgagctgtggtaaatttagagttgtctttactctgatggaaaatatatacggtatctcttttctgttgttctagtggctgtgtttaccattttaacatgcacatttaagttttcaaaattaattttattgaggtataataactatacaactttattgaggtatgcaactttttatacctttgtaagacaactttataatagaactttatgaggtataatttgcatagcataaaattcacctgcgtgaagtgtatgctttagtgagttttaggaaatttatagcattgtggaaccaccactaccatctgattttagagcatttccaccatcccaaagtggtcacttgtacccttcaatgacatttcctattaccctctgagccccaggcaaccattaatgtgctttctgtccctgtaggtttgctttttctagacaggtcttataaatggaatcatacaatatgttatcttttacatctggtactttttccttagcatactgtttttaaggttcatccacattgtaacgtttgttatacttcatccctttttagtgctgaatagtattccattgtatggtgtggtataataaataatatatctagtctttgttgccatttctggcacagagcttcaaaagccctggaatttcctgagtgataggagtgtctttgttacaccagtgaggtgactcacgtgtccttctgatagcttcaggatgagggctgaccgctacaaaagaccaaacacatgattagaagattaaggcttttagctgccagacctcccgggagagggagaaggaggtattgggggaggattagagattgagtttaatcattcggccagtgatttaattaatcatgtctgtgtaatggggcccttatagaaactctggatactgacactcagtggagcttactggttggtgaacacattgatgttctggtgccaggagagaaatgcacttttattctacacagacagggtggagaagctctgtaatctgttccacactttgtcctgtgtgcatcctttataataaaactgtaatcataaatatagcactgtgctgagttctgtgagtcatcctagtaaattgttaagcctgaggaggttgtgggaacccctgaatttgtagccagtaagtccaaaatatagggaacctggggatccccaaagtgcagctgatttctgaagtgagggaaattttgtagaagactgagctcttcacttgtgggatctcataccaagccttgttggttaatgtcagaattgcattgcagaacacccagttggggtggaaacggtatacagatgtactccatgttatttgctcatttaccggttaatggacatttgaattgcttccactttttggccattatgaataatgaataatgccgatatgaatatttgcttattagtctttggcggatatatttcatttcttttaggtaggtacataggcgtggaatccttgattgtttgctacatttatgtttaactttgtaagacattatcaaactgctttccaaaatggttgtgccattttgcattctcatcaacacttaactattttctgtcttttttagtatagctattctgatgggtgttaagtggtatgtcattgtggttttagtgtgcatttccctaatgaccaatgctatatatatatcacttgtaaatatttcctcccaacctgtggttcatcttctcattttattaatagtatctttcaagccagaaaatttttattttgatgaaataccatgtatcagttttttattttgtcagttgcgtttttggtgttatatctaagaaacctttgtctaatctaggttcattaagatattctcctgtgtttttttaagatttttgtagttttaactcttaaatttaggcctataattcattttgaattaatttttgacttatggtgtgaggtaagggtctaaaaatattttggctgtagctatccagttgttcaaactttttttttttaattattttttccctcattaaattgccctggcacctttgtcaacaaatttattgatcataaatacaaggatttatttctgggttctcagttctatacaactgtgttcaatcgatctatgtatcttttcatatgccagtactcatatctcactgtgttgcgcagactggagtacagtggtgcaattgtaactcactgtaaacctcaaaatcctgggctcaagcgatcttcccacctcagcctcccaagtagctgggactacaggtgtgcgaccattcctggctaatttttaatatttgtatagagacacagtctcactttgttgcccaggctggtctcaaattcctggcctcaagtcatcctcccacttaggcctcctcaagtgttgggattaccggcgtgagccaccgtgcctggccagtattgtcttgattattgtaattttgtagtaagttttgaaattgggaaatgtaagtcctcctgctttgttctagttccagattgttttggctcttctgagtcctttgcatttccaaataaattttaggacctgcttgttggtttttggaaaagacccactgggattgagatggagattgcattgaatataatgatcaatttggggagagttgccattttgatagtattgattcttccaatccatgtacatgaggtggtctcttcatttattttcatatttcctttaatcatttaaacatgttgtacactgacacacacaacagacacacacacacacacacacacacacacacacacacacacacactctttctcaatttggtaaccagccttatcatgctttcctatttcttccttctcttcatcctgatgccttccattttaaaattatgtctcacataataatcctcttacttggatttattccttttctccccgctagtcaaagtctcactctgtcgcccagcctggagtgcagtggcacgatctcggctcagtgcaacctctgcctcccgggttccagcaattctcccacctcagcctcccgattagctgggattacggcatgcgccaccattcctggctcatttttgtaattttagtagagatgggggttttgccatgttggccaggctgatctcaaactcctgacctcaggtgatctgcctgcctcggcctcccaaaatgctgggattacaggcatgagccactgctgtgcccagctattcttcattttgtcaaactatattcttgaataatttttttgaaaatggtctgtcaattataaaatttcattttgtcatctcctttgttttcttgtctgccatattctagaatcaaaattattttccctcaaaactttgaagatatagctatgttgccttttatattcagtatgttggctgagaggtttgttgccaatatgattttatgtttttgtgtatatggcattttttggaaacaggatttttctcttggatttctgaaaatttagccctagctgtgtaaagtatcagtttcatttagaggttttcttgatcttagatttttaactttactcatttctagaaatttttgtttactattcctttgttctagtctacatactctctagaactacttttaggtagacgttggtgcttttctgacattgctctgtatttcatctcttactccttcagtgtgttcagagaacattcattttttcagttttctaactgtaatgtttgtctatcatcagtcatatagtgaattcttagacttcagggtttttttggtcctcatatcagcctaatgtttaattgatgtgacatctgttacccttttgagggtatcgattttacatatattttttgttttcttttgagacagagttttgctcttgttgcccaggctggagtgcaatggtataatctcagctcactgcaacctccgcctccggggttcaagcagttctcctgcctcagcctcccaagttgctgggattacaggtgcctgccactacgcctggctaattttttatagttttagtagagacggggtttcaccatgttggccaggctggtctcgaactcctgacctcaggtgatccacttgcctcggcctcccaaagtggtgacattacaggtgtgagccaccacgcctggttgattttacatttttaaagctgtcttcggtttgtcctattaaacatttccttgagtattatttttgtttctcaaattgctgttttctctatttcatgatgttggtttttctcaaatattgattcttagttttatcttttccctgtttgtctgtggaagacttgtgtttgcattgcttgtttctgggaggggtgtgacatactgtttggtagaatgtacagataggttttcttcagacattgtggtttctctgtctgtttggggggtcagtagcaacctggactggtatcttctttctctggtcccaatgctactgctatagtctcagtaaactgaatgtctcttgtttatcatgaacaaggtgatggggaaggggagagaagagttacgcgtcttccaaatatggctaccagtgactcattctttccattgatatggggcttattccctcttcttgtgtccgttgaatctagtatctctagatttttttaaattgctcctacctcctctgctcttttctgtgtgagttaggtgcagtagtttgttcagaaagctgttttttttaaattatagtgaattcttctgtcattctttcacctttaatgttccttattcctgtttgtttctttcttaaatgtttctatttaaatagtttcttttgtattgtgttctccatgaggggaaatattcatttatgcttgaataaggtacccatataaaaattttgtctgatactgtttatccattacatacgcctgagtctaaaataaaagatctcataaattttagttttggttataaaatagtttgcctttttcaatagtaataatagttttttaaatttttgttctgattatgatttttggtttgggtttttaaaaatttttccttttccttttgttttccagcttttttatgcctttcaagatgataggtatctgtacatggtaatggagtacatgcctggtggagaccttgtaaaccttatgagtaattatgatgtgcctgaaaaatgggccaaattttacactgctgaagttgttcttgctctggatgcaatacactccatgggtttaatacacagagatgtgaagcctgacaacatgctcttggataaacatggacatctaaaattagcagattttggcacgtgtatgaagatggatgaagtaagtaagcaaattatttaaaacgatagtgttttgagggacagaaataaatgaaatactttaagtcaggtcttcatagttttgaacaaaggtaaatttagttttcataactgtatagcacccaaacaagatataaccaacttaaaacatttccttaaccaacttaaaacatttcttttgtaatcatttatgtagctgtagagtacttatcaagagaaataaaaacttagcttagttatcttcctcatagactgttgacaagcatttgctaccaatcaaaaccggttcatatgtataatttaggtgaagaaggacacaaaatctaaattaaggtaaataggtattttcaccaccattgttacttctgcatttttttctttaagaggaggtaaaagtaagtaaagaaatttatgttacaacctcctcgtcactccctctgcatcaaccacacagaataaatttgggaacatcatctgttccgatgctttacctgttgatcaattcatattatgattgataggttcagtggcattaacctcgtagctaattatgatactgatttattttggttgtaaaatttatatatcttgcccttttctctgtaagtgtgcagtaagtaattcttgatggagagggatcggttctgtttcctttgtattaccctgttggtcctaggagtcgacttataaatgttaatatatattgacagcaaactgtatttcatcttttgtatgttttttataactttccagtatgcttataaagccaatcttatttcttggtagttacctagtcaaatgtttattttgagttaaggtaattttctctctacctcttaacttgttcatgccacctgtatgacattcacttttattgatcattctaccttcatcagcattccaacttctaagctcatctcagattttacctcggctttaaggttccttctgataatcctgacctgactgatcattctttaatgtcataatgtccataatttcctcacatagtcagaatttgtgctatactttatgggccatttttgtctatcttaatctatccagctagaacttaatatccctatatatttttggtctttttgatagagtctgttatattctgcaacccttaatcaatgtttaataggtggagttttttattgtacccaaagctccctcttgtggtatttggtataatatagtgtgaaatgattaacagtgcaaattatctttaatgaaaatgaagtatgaaataatttcctaatagaatgctaaacttatgtctgctatacataagagaagatgtttttgtgttgtacttccatgaatgtattgcgattttcattaaaccaaaaacttttggcactagggtacagacaaataaatcataccacatatttttagggaagataagggtggttaaggagagcaaggtgtagagaagaagaatatggggaacgggatagaatatggtacctacagaataattgtataagcatgtaagcaaatacttaaattgtctctttataaggcaaagtaaaacatggcctaattttgtttactatttttacttttatttatttttatttattatttttaataaatttaaaaaatatggactgcttcaagaatttgcatgttatgcttgtgcagcggccatgctaatcttgtctgtatcattctaattttagtatatgtgctgcctaagtgagcacggtttactgtttttaaactcagatacagacagttgagttaattatactccttggttcatagtttattgtcatgagtagtcaacacgaaggcctcatcttgcttttattttatattttcctccattcagtttctgtctcattctgtctttcctctccctaatagatagctagtatatgttcaccatacgtttttgcagattattagtatagtgtactatatgttcttagctggtataaacagtatcttgatatagatgtcattttgtttgctgttgttactcagcattgtttttatatctctccctgatgtcagttagttcattgcttctttctgctgcttagtattccatagtatctatcaatcaatttaccttattattccttggatgttcgatttctaggtcacctccaaatccctgctaacaacaatactatcttgaacatctttatatatgtcccatgtatatgcttacagggggttctctaaatataaacatagaagtgaaactactacatcagagggtacataaagaaagaattgcccgatctccagaatggctgtgaatgtttctaactacttactactagtacatgagagatcttgtctccccatatccttgctaacacttactattcagttctctaagggttaccagttccgttgatatacagtagtatctttaaacaattatgttcatcttattggactaaggttgccaagaaaaaaataaataagatttgtaaaaattacattaatctttttttgttgttattgtagacacggtctcctctattgcccaggctggagtgtagtggtgtaatcatagctcactgtagcccgaaacccctgggctcaagggatcctccctccttagcctcctgagtagctgggacaacaggcgtacaccaccatgcctggttcattttttaatatttcatagagacagtatctctctatgttgcctaggctgatctcaaactcctgggctcaagtgatcctcctgcctcagcctcctaaaatgctgggattacaggtgtgaggcactgtgcctgaccagttatgttaatcttgtaactaatgatgacaaacctctcttcatatatttgtcagtcatttctgttttgtgaattacctgtttatatcttttaactcttttaaattggtttcttgttcatgtacagggattgcttatataatctagatagtgattccatagatattgctgatatcatcttccattgtgttacccatctatgccttcctttgtttgaatagaactccttcattctgatgtagtcaaaggtgttctttaacaaatactgaacttttaaaatgttgttttaccccagatctccattcctcaagcaatactaaggataattatacaatgtttaagaacaaaagagttttttattaaaaactatagtacattggatttataattttctattagtttttaacatgaatagtcttattgcaagtttaaggctcaacacttcatgtgcctttgtttgattattgttactataccaaagccattagaaatgtccatagttttggccagctgtggtggctcacacctgtaatcccagcactttgggaggccagggtgggcagactgcttgaagccaggagttcgagaccagcctgggaaacaaggtgaacccccgtttctactaaaaacagaaaaattagccaggcgtgatggtgcatgcctgtaatcccagctccttgggtggctgaggcatgagaattgcttgaacccagggggtggaagttgcagtgagccgagatcgtgccaggccacagccctccagcctgggcgacagagcaagaccctgtctgaaaaaaaaaaagaaatgtccatagttttattctcatccacttacagaagggactgtgacttggttttatacagcttacatgccagaaataacttttacatttttaaaagtttgtttaaaaaaaagaagaaaaatatgtgacggagaccctgtgtggcccacaaagccaaaatatttagagtctggccctttacaggaaaaattagccaatactttatctataatatagacatatatgctcaaattatttttcagccatcctgacttcctataaaatgttatgccatggataaaagcaaaaataaaatacaactataaacttacaaggactaaaatgatttgtcactatcagaattaagagtaatagtatctcattaaattatataattgataaattgtatattacacaactttctggatgcagttgccatcacccttattctctcaggaaaaaaaaaacttatctaaatgtgagtgagagtcacattgtaagatatttatatgtagatgtgtctcagtaaaagttgagagctactgctatgttgggtgtactctttgcgtgtcatgcattttatagcaacctttacctccttttaagaccactttatatgttagtattttaaattacctgaagaggccaggcacgatggctcatgcctgtaaccccagcactttgggaggctgaggtgggtggatcatctgaggtcaggagttcgagaccagcctcgctagtatggtgaaaccccatctctactaaaaacacaagaattagccgggcatgatggcgcgggcctatagtcccacctacctactcaggtgactgaggcaggagaatcgcttgaacccaggaggcggaggttacagtcagccaagttcgtgccactgtgctccagcctgggtgacaaagcgagactctgtctcaaaaagaaaaaaaaaattacctgaagaaaaaaaaaaattacctgaagacgatttttatccattaatattctagcatataccatttgactaaatagaagatataattttttaaaagctaactggtagcttttctttttaagtaatttttttaaaaaaaggtatgcattttcaaaaggtttctcagattattttaaatgtatcatattaaatatgtatttgctaaatgtatttgatgtattatggcccaaaatatcataaattcagagaatttactgaaaacactgaatttactgaaaagagaagaatttcctaaaacagaagcattcagtgattctgttattaaaaattccatttacagttttttttccacctttataggaagcatttcagttgtttttagaccaactccaagatttctgattgaccagttttgtgttttcagtaagttatctcgatttatgatattttttgaccatgataacacatcaaatatatttagaaaatacacatttaatctgatacatttaaaataaaataatttgagaaaccttttgaaaatgcatacttgattatctggctttccagcttaatacccttcagtagatttctgtcatctactgaattaagttcaaactccttagcttgtcacatgaaatttcttctgatacgaccccctgcctgcttttgtaccctattctctatcatttgacagtactttatggcttagaagtcttgagttacatgtagttctttctgtactatgatatatcatgattcttggcctacgtatatgctgtctaaaaatctgcctggaaaattcttattcatattttgaaactcagtccaaagtttgccatcttgtgaaagctccttaggttgacttctttgtcctttccacatatcccccttttggagcattttcttattttttgacactatacaatgttcaagacttgtcttatattttctctgtctcacctctggaatcacttctccaagaagctctgattctttttattaaagaatggtatttataaatcaataattgggtgctagatgtgctcattgcttctggactgtcattacttctaggccctgccagctgacagagttagggggtatatattgtatatactaaatgtactaaaccataaaccacatgcacacatgtttatatttaattctgaatatgtctgtatatatagcatattaaaaattaggagctcatactgataactctgattcaagtccagcaccactgggtttattcttgtctccctcctttcttttttgtaatttctttcgtgaacagtaaaactcttggctcttattatctgcaatatatttacttaccagttgaaccctagtatacacataaaattatttcagaattgtcagtccttatccctgtgacaaacagatttgctaaccaaaatatattatttttgtacacttctttctgtttttaattagtcttacagtattgtgttaagatgttattttccatagttacttagtttattttgtttctttctaccttctctaatgtggttatattatttgtttataaaacaagttcatttcttgttttttttttttgtgttgcatttagagttccccccacatcctgattggttttaatgtttatttttttttttggatacgtgaagtttcctctggttttaggagatagagccatgcaaaatgtatgctcagagaagagtcacttgctccatattcccataccctgttcccattactcccttctttccatcctttgcccacccacccactgttggtaaaccaatctctttagttttttacttatccttctcacagttcatttaaacagggttagagacttgttataaatgtagatttcatattcatataatttgagggcttccacataagacactttttaagtatttttaaatatcattttcaaatgtttgttttaaaaacttcagtatgctatccaaaaattatggttagaacattaattttccaaaagcagagtgttattcacatagtttagtatgtgaatatagtttactattagtaattactattactatatagaatataatagtttataaccaataaaaatctttagtcctacccaagtatttattctgcaagtggttattcacactgatatgcagcttatccttccagtcttcattgtgtagaactttacatttagttgatttggatttcactgcatttcttgaacaagtttataccaggttgttcctgtttctttatgctctttttttctatctaacctgtcataccatcctctctcctttaaaccctagcttatccgtcctttacagcctaactttatgccaattctttcttatcttgccctttcttctccttcctctgaacctttgaatgctaagtaatttttcctttggttgtatgtgtgtgtttgtgtctgtctgtgtgtgtgtctccagtaagttggttttagtagctaagtctcatataattttttaaaagcttaatttctgtggatgtatgtgaaataaggaaattttctttaacctaataagcctctattgattttttcccccaacagaagtctagactataggacagtccatgataaaaattaattgtataccctgccttttgaagtcaggcactgtcttgttcataatttgtcctttgtaataatccacacaaagtgttactcccatggtttgctcaattatttccataacatttatttttaaatttctattcacactaaaatagcttttattctctatttgctatatatgtgggaaaataaagccattgagttagttctgccaatttgagaatgaatgaaaagatcttttctataacaagttttatataaagttacataaattaggtttacaaaatgtgttcaacctccttttctcaaggtagccataatactcaatattaggtagtttgtatagcttccttatgaggaatgtgggcaacacactctttactgggcaggtaaaggaaataaagggcacttaatctctcaaatcattgcaagttggacagagctagaggtaaagaaataccatttagcaccatacttctctagtcatttaattttgcagcatgcagacacacacacccctataatggttattttacttgtcaaaaagacatcagggagggattattttattatctgctgaaactaaacacagataagtggtttttaaaaatcatcatgccaaatatattgatgccacagctgcatatttctaaatatatagcttggaagtatagctttcacacttctaagatcttttaatttaaacatttgatctatttcttcattttttttcttggtaatacaagagccaattctttattcagtctccaaactggggccctttgttatcttgattacttcagtttattctggaaatatgaaagcttcctttctctaatgattctttttcctgggtcagtgtccttaagaccacattttgtactaacctcataactgtagtgtaagaaataagaaaaagaaaagttgttgatttgcatggaatctccattttaccaaacttttttcttctttcattgaggaagcctcctgtattttagagttcacagtttattcctatctcccataatttaggcattttaatgcattttccagtgtatttattctctgtatcctgaagtcatgtcagcagtgaagttctgttggttagcaatatgtaatcattgtatatctagtaataaatggattcattgcatttataagtgtgtgtttttacactgaactgttttttctttatctctcctgttcatgcagacaggcatggtacattgtgatacagcagttggaacaccggattatatatcacctgaggttctgaaatcacaagggggtgatggtttctatgggcgagaatgtgattggtggtctgtaggtgttttcctttatgagatgctagtgggtaagtaaatattttaacttcttttttcaaaatgcttcttataatactttatttcagtcaagaatttgagaatataaggaaattaattgcctttgtcgtagggaagaattagatttctggaaactttgaattagtagtatctgatagggcagactgttaattggaaaattaataccaagcctgatactggcatggtgattaaatagaataagtagaatgtaaaaagaattaaaaatatatcagacatttttgaattaaaatattagaacaagaagcaagtttacagcttcagtgggccttcattctaagattttccttcttttttttttttttttttttttctgaggcagggtctcgctctgttgcccaggctggagtgcagtggcatgaatgtggctcactgcagccttgaccttctaggctcaagtgatcatcccattttgcctcccgagtagctaggattacaggcacatgccactaaacccggctgatttttctcattttttgtagggagtggtctcatcatgttgcccaggctagtttcaaactcctgacctcaagtgttactcccacctcagcctcccaaagtgctgggattttaggcatgaaccaccacacctagccctctaagattttcttgatcaatcatatttgttataatatttaaatataagacttaatatttgtcccaatagtagtagagaagtaaaaatctctttagtttatgtaattacataattgatttcgtaaacaactgtattccttccatttacttcttgcatatatattgtttgtaattctcgtgaaataaattataaatacagtgtttaccatttgattatcaagataaatatattttgtaataacatttcagttttagaaaactcagagacagatttagttatttcttcttttttatgaccaaatcaaaatttgaaaggctgaagtatttcaaaactttctttacatcatagatttcattcctaatgtttcccatttgtaagtactggggtcataaaaatactagtaccttctggctaaggaagccagtgacgtggcatggggatgagggttgaaaatgtagttaaatccactttccaaggcaagtatgtcaaggctaataacataatatggaattaattagagttaaaaatatactttttagaattagagaatatattttctaaaagatgagcctaaaagaaatggtagtgtaaaacctgtatgataaaagactatggttattgctaaaaaatcagaaattttcggtaaattgcaaatttaaataataattactcttgaacttttttgtggcataaattgttttctcttgatgactgtcttgtgtatgtagcattgatcttgttatgctttgtttcatgtcatagtatgacctactttattttgggcctttcaaagtgagtctgtttgtacgcatcatatggtcccatgtagctgtccgttctcccatctctggcctaggttgtgtcttgtaatcttttgaaaatagagtatattctcttttttgcctagacacgctttcctagggatttacaaaataaggtactttagaggaagtaatttggcttatttgatgaagaggccatttaaattctcacgactgccaggctgggtggtgctagctcagctcttcaggaggctgaggcaggaagatcacttgagcccaggagctcaaggccagcctggggaacatatgagatactgtgtctaaaaaagtaataataaaagagtaaaattaaaataaataaaaaatttttaacataagaaagtttaaaaagttaaaaaataaattaaaaaataaaaaataaaatcttgaattcatcacttccctccacctttctttgaacacaaacaaaaataactacctgaagacattttttgaagttttggattggctgatttgggaaagtcaggttttcattaaagttacttgtagtgtaggtgtactggcagagcctgtaacacttgtggctttagctgagtactggccaaaatggtgccttcaacattttccatctttatacttgcttcagtgcatctattacagtcattagtaagaacactgcatggggagaccatttcttccctctttcaactctagctatatgtcattttaagctagtcacagtctgtctctctgggcctgacttcctcttatgtaaaataatagagctggtttaactcttgcagcagccctgtctggcctatcatgatgtaaatgatttaaatctgtgctgtccagtgtggtgaccattggttacaacatgacttaaaatgtggctagtataactagggaattgtgtttttcattttatttaattcattttaactttaaattgccacctatagctagtggcaactgtgttgtataacatatctctagagaatgatttcaaaatgctgatccagcccaagcattaaaggaccctgactgatctgaccccacataggaactctttctcttggactattcagtaaaacatttcctctcttaaattaaaaaaaaaaaaaactcaacaaattcgggagttatcattgattttattttgcttttaagggatgagggatcattggtggtgttaaattttaaatatattctttgatttagaatataacaatatgtctgttgttttgactgggactctgtgcccgtagaatatttgttcttccctgcatgtgacaaatttaaacttaacatatttaagtactaggtgaaaagtgtttcctttgcattctctgttacattcagtatcttctttcttgaaattttaggggatactccattttatgcggattcacttgtaggaacatatagcaaaattatggatcataagaattcactgtgtttccctgaagatgcagaaatttccaaacatgcaaagaatctcatctgtgctttcttaacagataggtaatgtacattgaatttctttgtagagaagccctttatgttaaatttatagaaataaaagcatgcctagcttattaacatatgaaatcagtctgcctctcattacccaagtagcatctaattctgggttagccttttccttctgctaagcctggtgttgggctaccttgttgttatgtgtgtacagcccagttgtaatcgaactctaaccttaaccctcatgtctaaaaaggaaaaaatagaacgtggtaaaacaatggatttgaaagaaataaaactttcgtgttgttcacattttatcctccaagctggttattccatattactcttatataacttttgagagtattttgtgtagataaatactcaacaggttataatcttaaaaactatttgtgttagacttgggagtgcttccttcccaaccctttttaatttgcatttgaatatgagcaagactatcctggaaattccatacttttaaaaacaaaatagatgaacaaaggtgtgaaaacctgcccccaaaagataagctagaaaactatttgatttctcttctttgttcaccccattccatttttttctaatgtcccgttttatatttgtgataggagtcatcctgtcaaaggaccaacatatacaagaggatgctcacaccctcgttcaaacttacacatcagctttatgatcttggggaaattatttttacttttttgggaaataattttactcatccataaaacagtggtctcaaattacaaaactaagggcatttctagctttaatatgctaagattccttagcacatcttattgcttattaatttgttacaagcattactgcagtgactatcctcacacattcatctctgcatactttttataggataaaatcttaaaggtggaattctgggatacacattttaaacttaagtgatgttacaaaattgatccccagagaagttacagcagtatgtatttccattaacaaaattgttttcttctcgtcaaactgaacattgtaaaatgttttttctttttttcatcaaagaggataattatttttatttgtcagtcatttgtagaataaaactttaatacctgtcaattacatggttgacgagcagttggtgctgataaactcaaagtaaaatggaaatgacgatttatatattaagacctggagatgaggagatgttatctttgaaaagaaggagagacgcctctttctaagaggatagggtggaagaagaacacagcctgtatgatgtttgatgtgggcactgagcaggattggtagggatggccataatttgtgctggatgataaattgtacaacagggtacacctgttttatgttaatgaaaggagtgttattcatgaaagttttgaattagtagtcatggggcaggggtgtgcaatctaaggaatgattataggtggaaaactgatattttgaaaacgagttaatgccgtaaatatggctaggagcacttccccttaaggtctacagttttcctatttatgttaaacatagctccagggccttgtataacacagatgctctctatttccatacagtcttcattgaagactcagagggtcaaagaatgaaattctttgtaacatttttcatatatgcagaatgataagtttaatatacatgtagagatatactttaccagaataaatatggatagcttcaaacataatatatgcattctttttaggaaagggagagatttttaaaataatatttctattagggaagttttgaataactcttctctgccgaaagttagacctatgtctgtttatatcctgaagttattgtcattcagtcgtggcacatgcaggtgaatttttttacttgatagtcttaacgtactttcatttgatgcaaactatagacagaaacattttacttttcatgacatttattgtgcattacagttttttaaatctgtctaaagagatcacatactgtaacttgggattgcttatttttgagaaacatttaagctgaagcttttaatacaaatatctcaaatttacttgagatctttattttggttaaactgttgacatagagttaatctttttattttataatttttaaataatacaatctttaactgcattgtttagggaggtacgacttgggagaaatggggtggaagaaatcagacagcatcctttctttaagaatgatcagtggcattgggataacataagagaaagtaagtcaataaacctaaatattttcattccatcacattctgaaactcataagttgattccttttttgaaataacaagcatatttgataacacttaatgctaactcatttttaaattgagaaatttcatttcaaatttgttctgtggcaatatttataacaatattcctcaatatctttgcaaactattagcaatatttctcaacacttttacaataaacattacacatttcttaatttgccaagttaagctttgtagatctcaataattttcagaatcaagggaatgcaatcctttaatttaaatgcgtttgacttgataaatcaacaattatttatggagaccatactctgctaaatattgctgtaagcatagtaacttatttttactatgtatatatgacattgattcattttaagggtaagaaatatttctgtttcgagattgtagaaaatggaggtctctaaattctgtgcaaattattgctgcttgtaatttttaacaactagaataatatgttgctttccttgtttaatctatatttaaaagtgatctaatatagcaataaattacaaaattttaattctgtgaatcgataaaatggcaaatgcgctgctacaaatttatatagtgttattaaataataaataatacatcataataaaataggatggtttatatattttggttgtgaatgaaataatttatttcttttcttttaatagcggcagctcctgtagtacctgaactcagcagtgacatagacagcagcaatttcgatgacattgaagatgacaaaggagatgtagaaaccttcccaattcctaaagcttttgttggaaatcagctgcctttcatcggatttacctactatagagaaaatttgtatgtggtttattatttgttaaattttactgtttttagaatctagctataagatgatgtgttattttgagactcaattataggagataaagtattaatttgttttttccaaaaggactatcatcagaagaattcttaattttattttattatttctgaatgttatatgttattcatttataagttattgcaagacaccattctacattcttttggggatatacagtaaaaacaaatacctatttttgaagaagcttgtcatctcgtgaaggatataagagaattatatagtcataaagaagggtaaaatgtgacagttgccttaagaaagatgctgagagaatctgggatggttcagaagaaaaatagaagtcatctctttggggtgggagtagggagaaataggtcagacctctgggaagaggtggcattttagccaagtctaacaagaaaaggttttgagtggctgaaatgtggggaggttaggggacagttgtgaggtgttgaatagtggaagcaaatgtttggaatgtgagcatacattgggagcagagcactcgcattgagtccagtagcactcaaacatagagcaggtgctactatgtcattacagtttggaggactcgatgagactatgtggttttcttgcctgtagtctctgcatctagcagaaagtctgacacaagatcattcaataaatattggttaactgaagtgagtattggatgtaagattagaaaatatgttgaggccaggtgtggtgattcacacatgtaatcctagcactttgggaggctgagatgggaggatagcttgagcccaggagttctagaccagcctaggcaacaaagtggaaccctgtctttacaaaagaaaaaaaaagccgggtacggtggctcatgcctgtaatcccagcactttggaggctgaggtgggcagatcacctgaggtcgggagttcaagaccagcctgaccgacatagagaaaccccgtctctactaaaaaatacaaaattagctgggcatggtggcacatgcctgtaatcccagctactctggaggttgaggcaggagaatcgcttgaacccaggaggtggagattgtggttgaaacgagatcgtgccattgcacgccagcctgggcaacaagagcgaaactccatctcaacaacaacaacaacaacaaaaaagccagatgtggtggtttgcgcctgtaatcccaggtactcagaggctgagatgaaaggatcacttgaggccaggagttcaaggttggaatgagctgttccagcctgggcgacagaatgagaccatgtcttaaaaaaaaaaaaaaaaaaagtgagttttggggaagaataatcaacagatgattgttgtgtgctctgctaaggggcttttgaccgcctggcattgggaagccactgaaagctgttcaatagttgaatgaggcattaaagatatttgagaagcccaggagttcgaggctgcagggagctatgattgtaccgctatactccagcctgggtgacagattaaaaaaagaaagaaaaatgagataataagatgaagaggtgggaagtatagtttcatttagtgagtctggtgcaaacaaaattaaagactagttatcccgtaagagggaaaggcaagaaaagtttagcatttgattgattgattgatggatggattgagatggagtctcacttcgtcgcccaggctagagtgcagtggtgcgatctcagctcactgcaacctccacctcccgggttccagcaattctcatgcctcagcctcccgagtagctggtactacaggtgtccaccaccatgcccggctaatttttttttttttttttttttttttgtagagataaggtttcaccatgttgatcacactggtctcgaactcctgacctcaggtgatctttcccgccttgacctcccaaagtgctgggattataggtgtgaaccaccacgcctggccctagcattttaaattattgaaaatgatacaaatgtcttgagggaaaaatattgcttcatttgtaaataatgtgttgaagggaaaagagagaaatctgtgtttgatatttaagtctgagaataacttgaataaaacagcacatagattaaaatgaaatgaaaaaatttattttctccccccttccatgtagattattaagtgactctccatcttgtagagaaactgattccatacaatcaaggaaaaatgaagtacgtatacatttttactgctgtagttattttagtttcatgtttaaatattttagtaatacccatgtttttaaaaagctaatttgatgctccttttaaaatcatgagatggcattccttgtgtaatacagtttaacatagcattgcaatgattgatttatgtgaatagtatcattattcaagacatgatggctagtacaaagaggacttctacatggctttaggcttaattgagtgccaaaagtgatagaataagtttgtaaacaactataataacatttagaaaattgacttctataatttgtaaatgaatgcaaagctaaatcatacatggatatacacatacacataaatgatgatgctaaacattttttcttcaaacttatgaaagctaaagcattaggttggataattttgttatggtttgtgttttaggaattttacagaatataaccatcattttagtattttaatgtgttttctgttttgttttaaataggaaagtcaagaggtatgttgatgttgtcagatatattgaaaaactgagaaaagctcatcactctcgcaaagtttaaatatagtcatatcctacctagcatttggagtactacatctacccaagagagaagttcccaacctttcttctaccaagtatctcttttattattgttctgtggatctgtttaaaatatatattatgtaattttgtttttatttatcaaggacatataactggcagcaaaaatttctgattagcatataataactggtgtgctcaaattattgtaatgcagtagtagccaaaagcaattaaacttgactagttcattagcctgtatatttttattaagggaaaacagagttttgcttaagatagatgcagtatttaaaaccatggagaacctgatcactagaaggaataatggaaagtacattgccatgggagtctaatagacctgcattgatttttgccactgcgacttattagctatgccatcttggcctgattatttaccttttttgaatttcattttctgtatcaagtagatacaatgctaccatctttgtaggatttttgttaatattaacaagacaacatttgtaaagtgcctgatattttaccaaaggcaccacaggagctcaaaaagttaaatcctttaaaaagtaaataatgttccaaaaatggattatttaatagtttcggtaatttttgcttgtttaaagacttacatagctagggaaagctgctgaggagctggcttgtaattaattagctatcatttattcgaaagttattgattactcctcggtaatatgaccagcactacataggaagatataaaagaagagcttatattctttactttgagcatattcagttgagtactctgaatatttgttttagatgtattcatttttatccgactagcacaaataatgacaatattttcaagcaaataattcatagaaaagcagcagaagatatctgaggtggtattctttataatgaatttgaaactttgtgtcatagaacaattctgccaaagttagagcttcttatgcatggttacataagtatgtttcatatatacatgtgtactctgatagaaagcaagagatgggggagtttttccttttatcaatataagtcacattaaggaggtacaaatactgtaccattatagaggacattatgtttagtggaaagacaaaataagcttatcattgttttctttaagcctctcatctttaaatatgaccaaaatacgtaattacagtttcttgttttttgacagattcagaaaaaactgtatacattagaagaacatcttagcaatgagatgcaagccaaagaggaactggaacagaagtgcaagtatgttttgtagataattaaatattacattataaaatttaagtttaaacatttactgaaaaaagagcggccaggtgtggtggctcacacctgtaatcccagcactttgggaggccgaggtgggtggatcacgaggtcaggagttcaagaccagcctggccaagatggcgaaacccagtctctactaaaaatacaaaaattagctgggcatggtggcgggtgcctgtaatcccagctacctgggaggccaaggcagagaattgcttgaacctgggaggcagaggttgcagtgagctgagatcatgccactgcagtccagcctgggtgacagagtaagactccatctcaaagaaacaaaagaaaaaaaaagaaaaaacagaaacggagagctatggcctggtgcagtggctcacacctgtaatcccaacactttgggaggtcaagggaattacttgggaggctgaggcgggacagtcgcttgaacctgggaggctgaggttgcagtgagctgagattgcgccactgcactccagcctgggcgacagagcgagactctgtctcaaaaaaaaaaaaaagaaaaaagaaagaaagaaatggagagctacggccgggtgcggtgactcacgcctgtaatcccaacactttgaggggccaagggagctacttgggaggctgaggcaggacagtcgcttgaacgtgggaggcaggcattgtagtgagccaagattgcgccactgcattccagtctgggcaacagagcaagacttcgtctcagaaaaataaaggagagctaccaagtaattatgtaattacttttaaatttatagactatgttttattgtaaattagaagttatttactgtttctttctgaaattctttagatctgttaatactcgcctagaaaaaacagcaaaggagctagaagaggaggtaaagttgccccacttttttattaacatttttgttagtaaaaatctttgatgtctgacttacctaaggagctctcttggtaccatagtaatacgtgccttgaaacctaccttgtagtattggtggataggactaaattatagggaaatcatgttataaataggcttcattctgttatgtttttgcaaacttgagttaattcagtatgtgtaaatatttcaagggaaaaaaatgctattcataacattttaggccaaagtattaaataatgatagttcagtaattgtggaaatttacaggaagtttgaatagtaaacaaaacatttacggtctttatgatttaagagtagtgtgctagtttacaatcatagaaagcattattacagttttaacaaaaaagcagtgaaagcctttttgagatcttttttatctgtttggaatagcaagtattttttgttttgatttcatttttatacatacttttttgataataactttaagcattatttcagattaccttacggaaaagtgtggaatcagcattaagacagttagaaagagaaaaggcgcttcttcagcacaaaaatgcagaatatcagaggaaagctgatcatgaagcagacaaaaaacgaaatttggaaaatgatggtttgtggtgtagaatattaattactcatcaagaaaaaaattaagtgtgtgtatgtgtgttatgctaagcttgccactgaaatgctttttatcatagttaacagcttaaaagatcaacttgaagatttgaaaaaaagaaatcaaaactctcaaatatccactgagaaagtgaatcaactccagagacaagtaggtggatctaatttgtagtaaagatactgggttttatttttaacgcgataacattagttttaattgacagtgttgcaaaaggcctttacctctaattttagaaatcatttggaaaatatttttaggtttttgtttattttaaatagtttctaatgggggaatacattgacttattttcattacatacatgtgtgtttgtttgttgttgtttggttttgaatggaataacagctggatgaaaccaatgctttactgcgaacagagtctgatactgcagcccggttaaggaaaacccaggcagaaagttcaaaacagattcagcagctggaatctaacaatagagatctacaagataaaaactgcctgctggagactgccaagttaaaacttgaaaaggaatttatcaatcttcagtcagctctagaatctgaaaggagggatcgaacccatggatcagagataattaatgatttacaaggtattgaagtcgtggttgcacttgaattaattttgatgattcttattttaaaaataactttagatgatggatagtgtgctggattggacatttctgaatatactattatgtaaagttagaatattagaaatacactgatacaaaattttaggaacaaaagatttaatttcaaatagtatgattttaagtattaaactcttcaggtagtagattggattccatttgaattaactataaagcacaataccaacaagtataaaacttctgctcacaaacaacagctccaaaatagaaggtggcttgcaaactttttattcctaattgaatgtatatactttgtgggtttaatgttttaaaaaaacgttgcaatttttaggtagaatatgtggcctagaagaagatttaaagaacggcaaaatcttactagcgaaagtagaactggagaagagacaacttcaggagagatttactgatttggaaaaggtaaaacatgttttatatttttgcataagaaaattgacagtagactttcaggttagaaaagttattctaaactaagggaagtcactaactggaatatttccacatgctcatggattccttttgatttggacttgatgtgtagataagagatgtatctgcaggcttaccataacactgtacaagcagccctcagcatgctggttgctcatgaagtaaggggacccatcctggagtgtagataatgaggatctctctaggacccaaggaaaactcaaatttcgactcataacatgtcttaaaaatgccatatataaagtcaccatgacttttggcatttagaagtttttcttttaaaatactctaagaaagggatgatttctagagtctatgcagttagcattttattttcattcacttatttatttactcagctaaatattcagtgtgttatatgtggtagaaatatcaggatgcagtccttgccttgaataatgtcacagttgaatagttaagtttaaaagtaataataaagcacaaagataattctaatgacagtatggcaaatagaatgataagacttatggacagggtatatgtattgggtgtatgggatgcatccctaacctgacagcaggataggtccgtagggcaaaggcacattctaagttagggagaacagcatgagcaaagacatagaagatggaaaataaaaaaggcattgtttgttttctggagtatagagtgggagtcagcaaattttaatcgtttaaaggcatggtaataaatattttatcttctgtgggttatatggtcttgcaactgttcagccctgctgtgattcatgaaggaatggatgtggctacgttccagtgaaacttaaaaaagaaaaaggcatcaggttagattggcctgaagatcacaatgtggttgttatgtaaggacatgaggaattcagtggtcagaatgaggctacagagctcggcatgaggtagatcatgcaagatagcgaatactctattaagaaattttgaatgtagtaatgggctagccacttaagggctttaaattggatgatcttattagaggtacattaaagatagatcgctgtgtactgtgtggagaaaagatttgaggaggacaagactagaggtagagagactggtcagtagactttttcagtaatgctgataaggaataatgggagacttagtacagccattaaaaggttggaaaaattggaagactcagaaatatttggaagaggaatatttggcagcacttagtagttgattagatatggcatatgagtagcagtcaaagatgagtcccagatttgtaggttgtgacaagatatatagtgatgctgttaataaagaataaaggaaaaatagctcatgagacagtgataaacccactttagtcctcttaagtttgagggtacctatgggacagccaaattagcatgtctgcactgcagtaggctatagtagtagaagttagaaatatttgagtcattggtatgtaagtagctgaaatcatgtgagtggaatagcccatctgggaaaagactgtgtgaagtagtgatttttttttttcttttttaggacagagtagattactctgttggtggattatgtggtttgagaaatcattttttgtatgaaaggctttatttggaaaaaagcctttatcatatttatgatatgaactataaaaatcaaagaattagaaaacctttggggtttatgtagaaaataggaggagcattggggcttagatcaccaacatttaagggacagctgggaaagcttcaggagcaacagaaaggatgcaagcagaatggagagaaccaactaagtacaaggtcggcaatgccaagggatagttttaaggggggcagtgagttcaaataagactgaaaagggtctttagaatttgatattgagaatagcattggtctttttgttgagattaagtgagcttgatacagatctcagaacagcagagtggtggtgtagactgttgggtacagtgggaagtagagaagtagagtatatagattactattctaaaaggtttgagtgaagacgggaggggaaatactgaacattctagttaagcctgttaaaaaacaagttaaggttgagcaccatggcccacacctataatctcagcactgtgggaggctgagtcgggaggatcacttgagcccaggagttcaagatcagtgtaggcagtgtttaatgagaccttgtctctacattaaaaataaaataaaataaattagccaggagtggtgacaaacttctatagtcccagctactttggaggccgaggtgggaggattgcttgagcctggggaggttgaggctgcaatgagccataatcaaaccactgcacttcagcctgggtaacagagcaagactctgtctcaaaaaaaaaaaaaaattagaaagcttttgaaattgtgagctagtctcttttttgttgatagctgcattttaaatatttaataggaaaaaagcaacatggaaatagatatgacataccaactaaaagttatacagcagagcctagaacaagaagaagctgaacataaggccacaaaggcacgactagcagataaaaataagatctatgagtccatcgaagaagccaaatcagaagccatgaaaggtatgcattttttaaagagggttttccagcagcgtcttcctaagaattgattctgtgttagctttttggttttgaaacatttttttttatatttcattgtcaaatattgggaattggagggaaaaaaactattagggaagctttacatagatattctattatttttcctttgtatcattacagtaatcatttctaagatagtaagacccaaacacaaaattacatgatcagatttttagatcagagataaattaatgtttctcaatattatatacctggtaatatctgtaccactcggtatacgtgtatcagtagtaagaaggaatatctgaacttcacacgctgtatacctgttactattgatacaggtaattcttgtaatacaagagttttgtattataaaattcttgccagtttatgcaaggtaagaatttaaaagtaatagctggtctaactagaatataagttcactgagtattttgatctctaacatgatgaagatactagccagatttggtcgaagccatataatactaatagataacaaagttaaccttcccataaactagactttatcctggaattgtcttaggataattttttcttttccaaactgactgtttataatgactctgaaattccagagaaaatcagtactttaagctattcttgtgaaaggcttaaaactcttgaacagaaatttattttcatattgaagcattacatgagtaactaacttagaaaaaatagccttttaattattgcatgtaattaaaatggtagattttcttagtaaaaatcagtgtagtttaaggcactaaatcaggatgataagaaatgaaatgagtactttatttacaaaaatctaattgtaagggagaaagttactgggccatatttccttgtctgtggcctagaagacagagttcaattattttcattgaggtataatttacatgcaataataaaatgtaaacatttttgacatttcgtgatatgctcacataactactgttcaaaacaagataaagaatatatcaggctaggcatggtggctcacatctgtaatcctagcactttgggaggccagggtgggaggatctcttgagcccaggagtttgagaccggcatgggcaacatagcaagaccctatctctacaaaaaatagaaaaattagctggatgtagtcgcgtgcgcctatagtcagagctacttgggagtaggactctcagtattcctgcaatgatgcaggaacattgcttgagcccaggagttcaaggctgcagtgagccatgattgcatcactgcacttgagcctcagtagcagagcaagaccccatctcaaaaaaaaaaaaaggactattttcattatctcagtaatgcctctttctattctcaatgcctacattatggtgattgttttttttgttaaatgaggacatttgtttagtgattattctctgaattgataaaaatgaaccaattcagtattaactaccatttttttcaaactattaaaacgctaatgtaagatacatgatgacttccatattttacacatgagtacacaaaactgttacatattatagatggtttcaaatctgaggctaaagcctttggtccttctgttgcatgtcattggctccttggattaagaacatggctcaccaaataattactagctatgtgaccttgtctagttatttaaactttctgtgtcttgtttcctgtgaagggacaattacagtattgttacgttgttgtgaaaatcaagtgcaataaaacatgtaaagtgtttagaaatgctattattagtactacatggggaatgtttcatttttctgcacttttgaagaccattcattaaacactaaatattcataggtttaatttttacctaatacaactttataatagatgataattagatgttgagcattaattatgaaaaagcagaggagccttaattgaatgtgaactgaagtactaaccagtatatcaagataatcctttaactgtgatgacttacatttaacactgaaatcacttggaactttgccttctgataagtaaaatagattaaaaatttattgtaaataatttagaaaacacaggaaagtataaagaaaaaagcaaagattactcataatcctatgagttaggatactattttgtaaattttctccactttctataccgttttgctttttaaaaaacaagacattgtgagcgtttccttggtcattaaaaattctgcttaaataataagcacttaccaagtgcttgccatatgccaggcagcatttaagtggtacacatgtattaaatcttcacaacctccctaggtgctgttatccctattctggagataaggaaacaggtccagagaggtgaattacttgcccagtcaaacagtgttagacccagggtttaagctcagaaagtttggttccagagtcttgtcctttaccacctccctaaaacatatttttcaacacctgcataataatgtgttaacatggaaagtcctatggagatcatagaatctacctggattgttttaaggtaaaaatagtaacactgagagacatagaatagcagtaagcagtagaatataagaaacctttgtttaaagatgtaagcatcttgtagaatataaataaaggtagaactatcttgcttccattagaatagatgtaatattgcagagtgtgatacatttttacaccctgtgaatgaaactcctaattttcaagtatgaaagtgaaaatattaaattgaaaattaaggccaggtgcagtggctcatgcctgtaattccagcactttgggtggccgaggcgggtggattgcatgaggccaggagtttgagaccagcctggccaacatggcaaaaccccatctctactaaaaatacaaaacttagctgggtgtggtggcacacgcctgtaatccgagttatgtctggaggccgaggcacgagaattgcttgaatccaggaggttacaaagagctgagattgcgtcactgcactccggcctgggcaacagagtgagactctgtctcaaaaaaaaaaaaaagaaaagaaaaaaagaaaattaatagaatataaggcagcatcatttattataatttttattagtatggtgtcatttaatgtgcttttacttacaaatttatgatatgcttcttttatttgtaaatttatgattgtgtccatttttattatactagaaatggagaagaagctcttggaggaaagaactttaaaacagaaagtggagaacctattgctagaagctgagaaaagatgttctctattagactgtgacctcaaacagtcacagcagaaaataaatgagctccttaaacagaaagatgtgctaaatgaggatgtaagtattaagtgtactaatgattaataataaactaatgaattaataggtttattcatgaaggtctagtgatggtttcataattttaaagtttttcttataatagtctgcaacctgttggtttaactaaattttgatgatatactaaaggaatcataatttaaacatttttaaagttatatttaccttattatattttatttaaaaaatacaattataatattattagaaatacaaaaaaaattttagtatgaaatgaattagctacctaagggtaaaaaaatctgttttacatcaccatattttataccaacttcattgattagaaaaatggaaataatttacttatataccaagtacacaatttatttcttaggttagaaacctgacattaaaaatagagcaagaaactcagaagcgctgccttacacaaaatgacctgaagatgcaaacacaacaggttaacacactaaaaatgtcagaaaagcagttaaagcaagaaaataaccatctcatggaaatgaaaatgaacttggaaaaacaaaatgctgaacttcgaaagtaagttaattgattgagatgttttaatatgcataattatccatgtataagttaattttggtgtatctgtggattttcttttgagcattttactttctagaccatgttttctatttatttctgtacaggtaatgtgttgagtgtcactgttgtccttcgagattatattcgtttccccaacagtttttactgctgctacctaattacaatgtgatgatagaggaagtgttggtgatgaggcagaagaaaatatctgggattttcataccatgcttttagattcctcctcagggctctttctcaagcttattgtccgtgtgcctgtttgtttccttagtttcttagacttggaaatgtttgactgttaaataaacagcatgtaaatttttaatcatgtcataggatgtactctagtgtctacttgatttacttataaaatggagaacatattgttaaaatactttaaaaatattataggcacgattgtgcacgtctgtagttccagctacttggggagctgaggcaggagaatcacttgaggtgaagtgagattgctttgcactgtgatcatgcctgcgaatagccactacatgccatcctggacagcataacaagaactcaactctaaaaaagataaaatatatagtaaatatactattaaaatttgtcccatttattctattagtaggagaattacttcttcctaatcatgaccaaaggtcatattggatcccggttgtttgatgaaagacagtgtgatagagtggaaagaaaaaagtctttggatccagacagactgagttgtgaatattggttctgttacttaccaactaaccaacatcgggcaaatgatttaatttctctaagccttttatcacacttgtgaaagggagcagtaatagcttccttgttagggatcttgtaaaggatagcaatggtttatttaaagcatccatcatatgataagtgttagggactattactgctagatctgttactgttacaactactacagctactactaatgtatcctcattataattgtctgctttatgcatacctgtgacaggtcagtaagactgatgctatctaagaaaagatgcttaaaatattcaagtagactttgttctttttgctgagctgatctatttattgccagggtaagcctagaccttcaacttcatgagatttaaacttttaaaattggaactagaaattggaacagtaatcagacatctttgtctttgtgttttttgtgggttttttttctgtatattagctttatttttctctcttatttcaggccagctttttattctaacgatagtgtttatgcagatgtaagagctagttaatcatctaggttgtgtttccttcccacttctaataatgctttgtttatacctagtgtatatgcctcttattttctttgtaagtgaatggcgttctgttatttcttagtccctcttttccttacctctccccaccaaagacacccatgttttctatcttagccacctaatagggttatagaggaagtgttcattgtagggttaaaattgaagggcaaaaatcatttatttatattttgttctccccagtcctttttttttttggagatggagtttcactcttgttgcacaagttggagtgcaatagtgtggtctcagctcactgcaaccttcccttcctgggttcaagaaattctcctgcctcagcctcccaagtagctgggaatacaggtgcccaccactatgcccggcttatttttgtatttttagtagagatagggtttcaccatgttggccagggtggtcttgaactgctgacctcaggtgatctgcctggctttgcctcccaaagtactggaattacaggtgtgagccactgtgcccggcccccaatccttgattaaggttttacatatactacatcctcaataaatgttgtatgaatgattacatccctcttaggtgtaaggcattgtagtagttactatgaaagatagaaagattaaccaaatacatttcctacccatgagaagtttactagcattttatcattagttattcagtggggaagataaggcaggtacataagtgaatagaaggtaaaaaaaaaaaaaaaatacatgcaatgggaatttacatatgaagtgctatgttggcttctttttaaaatggccaacatgtatatctcttctttcttgtaagattccagaaaaactctagtaaaggaattaaaaaatatataaacccacaataaataagaatgagaatgggttggagggcaagaaggttctctagtgaatgagatggcagttagatggaagccttgtgactgatgaagtagaacaaaagaagaaaggagtatatataaggccaggggtatacatgaagtgggatatagatggaaaagaagtattcagagcaaataaggcctggagtaagttgtgacactaaatgaactaatctgctgatcatactctaccattaaccttgcagatatgtctgcagccaggcacctcccaccactaaggtttttatcagagcattctcctctacagagtaattgggtacaacctctggggtaattagaacagctaatatggggtgaaaagcctttctcactctggcatttaggggtccctttgcttaatgctggcttttaaagcctctcatcttaaactgaagcttgccagtgagaaaactcctacatacatagagattaaagtttttcccaccccctttgcaagtaaataaccaagtatcactaaacatttgaggaaagcctgcaatctgaaagaggaagattatgataatgaaagaggaaaagtgcccccggaggaaacatatatcaaggagtagaagagaactgctaaaagttctggaaaaacaaaagcactgtaaaaagctactggtaattagtattgatcaaagatttcaggagatactgcttccattaattgagaaccagacacaatgtaaaaggaacagccagaataggaacgagctcttgaagatgaataattactgccaatataaatttgttggaagggttcaaagtcaaagaaatttcctaaaatgtagaacaaaagaagaaatggcatggaaggtttgaaagacgtaagtaaggcccagagggactgttctaggagatctagcacccagcgaataagaattccagcaagaactaaaaaccaagaggaggaaattaaagaaataatagagaagaatttcccctagctgaaggagaaatgtctttagactgaagggactcagcatataaatgaaaaaagatctatatctagacatattctcatgaaatttcaaaaacaatgacaggataggagtgttagagttctcatctagtaaaccggggagattatagtttgtggttgctataagagggaaatggggggttcattataccacttagatgagtgatacaactatattgggaggtggggagaggttggggaaggcaagagagctaaattcaagtctgacaacagggaatgggcaaataatatctaaaacttatgagatgtggaggtaaccaccaaaagataaaacacaaatgaaacagttatttcttctaggcgaataggattagtaggggtggagaggtgtcaaatgaggagacttctacttctcattgtaatttcttccttctgttctgtactcctcatttgtaatcatgtaattacatggttctttctgaaataatactttctgaaaattacttttcttaaatacctaataaatattaggttataaaagttacatataaatgaaagatatcagctcttgaagaaggtcctgatgttaaaattatactgtggtttgctacaagtgggcttagctgacagtgatcggacagttttaaaacttgacctttcatatatttgttaaattgcatctctcacatctttgactcatggagaaataagaatcatgaattctctacagtatactcatcaacaataaaatacagaaatgacacagttaagtgacattgagtcataacttccctttttacccacaagtttaagagccagtgagtaaacaaagtgaccaaattatgttaaatgggaatgaggataaacctcctaagcagtatacgaactgaagagactagggttaaatcacgtgctccctctgagtcttcctgcattgtagtttttaaaaatacccaagtggtgttcatatagcttcccattgtaaaatacttgactacatttaaaaaaaaaagcagtaggtaagctctccttcatgaatgcagacattttcctctctccagaggtaacatatcaacaatttgttatttctccttccagactgttttctgtgcctttatctatatatctgaacaaatatatgtgaggttgagttttctgtacatttgattctattttttgcttgtttttaaattatatcatacaaattgtattgttctccaacttgctttattcctccttagttttggtttcggataactataatttttatgtttttaaaataaggccagaatttaatgtaccatttcaacccagcttcttaaatgggttgttgggcttgcttttattttatttattattttattcctttattgaagattaacataatacagaaaaagtacacaaatactaagtgtggagctgagtgaatttttacaaagtatacaaatctgtgcagccaccatccatgtttagatctaaagccagcacttctcgcctccccagaagccccctcccaggcattctgcactccccactgagatcaccagatttgaggtgctctttggattctacttgttggcataaatggctgatcacagtgtctgtatgtgaatgtgtgattcaatgttgatttagtataacactggtctcagaacccctttatactcttaaaaaaattatcaagggttctgccgggtgcagtggctcacgcctgtaatcccagcactttgggaggctgaggtgggcagatcacaaggtcaggagatcgagaccatcctggctaacacggtgaaaccccgtctctactaaaaatacaaaaattagccaggtgtggtggcaggcgcctgtagtcccagctactcgggaggctgaggcaggcgaatggcgtgaacccgggaggcggaacttttagtgagcccagatcgcaccactgcactccagcctgggcgacagagtgagactccgtctcaaaaacaaaaataataataattattattattattatcatcaagggttccaaatgagtttttgtttacgtttgttatatctaatgatttgtattgtgttagaaattaaaactgagaaaactttaaaacacaggaacacacaaacacgttattttagccatcagaatgatgtaattacaagtcatgtggcctcaggaaaagtacatacggtatataacgagggaatgagagttttaaaaaaaaccatggtgctcagtattatgaaaatgatttgaccttatgggttctgtggaagaacctcagagactcccagggcttcccccagaccatactttgagagctgctcgtttaaaatatgtgtaagttatttaaacctttgattcattgtcctcacagagaacgtcaggatgcagatgggcaaatgaaagagctccaggatcagctcgaagcagaacagtatttctcagtaagttcaagacacattaatttgcaaatagcaaacagagttttggttgggatattttatttataccatacaactcatataaaaagagcagctgggcaaaagaatgtagatagtttaagagaaatttattatcattgctagaaaaataattctaagcacaaaacatacctggtgaagctgattaacagcattgttttcaggaagaaaatattttcataatgcaagaaataaaattgtaataaaattatcattttaatagttgtgctttttttgagatcagttttaaaaatatgaagtagaaactcctgttttattgatttaagccaataacatttttttgtctaaattgttaatgtttttccttgcctccttattcattttacctatctgtgctattaaatgagaaatatcactgtgatatccagttgaaaatcatgcttcttaattattacctgaacttgtattagttaattgatgactagaaataggaaagttcattaaactattcatttgctcggggacttagcagtaagaaaatatttgtatgtgttcattctcctttttgtctgaatagcttttgaatgtagaagtaatatttctgatgatgatacgcatttctgttgtattttgctatttagaccctttataaaacacaagttagggagcttaaagaagaatgtgaagaaaagaccaaacttggtaaagaattgcagcagaagaaacaggaattacaggatgaacggtaagtatgagacccttgtctctttttgttcatagctgtatactttgctcctagaacaatgcctggtaatcaccaaataaaaaattattgatgaagtgaattagacaaaaactttcacttcatagtgaaaactgaaccattaaaatgatatattgctaaaatgtagggactctttggctgcccaactggagatcaccttgaccaaagcagattctgagcaactggctcgttcaattgctgaagaacaatattctgatttggaaaaagagaagatcatgaaagagctggagatcaaagagatgatggctagacacaaacaggaacttacggaaaaagatgctacaattgcttctgtaagtcaaattcttggtgcttttttggattatagttaaattgctatatcttaaaccttctttagacatactaagtatcacagatctaaatgaaaaattatatatgctgactacaagatttttaatctagttaactgccaccttctcaatgttgtcagaggagcttactaaaagtgacttcacctgttaatgaattcaaagttaaaggtctaaagtgaaagggtcatttttttttttctttttaaacagaacttagttcagaagaatcttgaaactaccaggaaaacagttccgtgcaggttgaaaaaattgcaataaaaatttcagagagaggtcaaatatcaagtagttaggtttaccctatcaattaactagacctattgaaatgctgcggtaattaaaaagtctggtattagaacagggatattcaatcctgttcagtggaaatgaaaagggaggccagaaagatttctgcacatacaggaacttggtatatatgatgggagtggcagtacacaaatcactgggaaaggacacatttcataaatggtttcagaataactgtgtttttatatggaaaggaataaaattaaatccccactacatcacacacaaaagtaaattctagctatcttaaggactatgaaaaataaaaattttaagctatcagaacagaatctaaaagttgcatatgacagaagacagcataaacaaatgacagaagggagatatttgtaatatatttattaaacaagggatttgtatctagagtatatgtagaatgtctgcaattcagtaagataagattaaagaatttggaagaaaacttagctgaaagagaaaacctaaatatataagcatgtacttaacctcactattgttcaggaaaagcctaggtaaaacaactttgaaataccatttcatacccatcactttggcagaaattcagtagctgacaatttcaagtgtctgaagaatgtctagaaaatggcattcttattcactatgggtagtataaatttagtatggcatagtacagtaagtagtatgacagtttccagtaaattttaggcattcacataatgcagtcagaagaaagtccacattaagataaatacactatagaaatttaggcacaatgcttatagcagcataaatatttagcaaaaactcaaatgtccatgaatgaatgaatgcatgcattaaatgtaatagaagatggaactattacatcagatcttcatttgtatcagcaatttaatgccttaatatgctattgagtgaaaacaattacagaaagataaattcagtaagatagaaaatcgcagcctggcatggtggctcatgcctgtaattgcagcacttttggagttgaaggtgggagtattgcttgagctccaggagtttgagaccagcctaggcaacatagtgagaccctgtttctaccaaaaaaaaaaaaaaattttttttatccaggtgtggtggttcatgcctatagtcccagctagctactcatgggggctgaggtgggaggatccttagagccttggaggctgaggctacagtgagtggtgatcgcacgccattgcactccagcctgggcaacagagcttgagaccttgtctccaaaaagagagaaaaaaaaaaaagaaaatcacataaagccacactgtgtattgtttcatgtgtatataatgaaatacagtcatgggtggaaaggcaaaacacgtaatttacagtaaaacttccttcaggccaggtgtgttggcttatgcctgtaagtaatcccagcactttgagaggcctaggcgggcgatcactcgaggccaggagtttgagaccagcctgaccaacatagtgaaaccccatctctactaaaactataaaaattagccaggtgtggtggcgcatgcctgtaatcccagctactaaggaggctgaggcaggagaatcacttgaacccaggaggcggaggttgcagtgagctgagattgcgccactgcactcctggttgacagagcaagactcacctgggtgacagagcaagactctgtctcaaaaaaaaaaaaaaaaagaaaaataagaggtttaacaatattctaggatgtttctcatttgaatcattttataacataaattgtgtaaattgggatgtgattattttttcctctttcatttcttagcttgaggaaactaataggacactaactagtgatgttgccaatcttgcaaatgagaaagaagaattaaataacaaattgaaagatgttcaagagcgtatgtattaacaaaaaatgtttatttttaatatacctaatgtttatcagctgctgtaattaccaatgtaattttaacttttttccatgtttcagaactgtcaagattgaaagatgaagaaataagcgcagcagctattaaagcacagtttgagaagcagctattaacagaaagaacactcaaaactcaagtatgtataatagaatctaaatatgattttgaattttgtctcagtttatctcttttacattttacttctagcattacaaattggtagcagtagtcatcgaatgtaccaatatttgtgaagtcacaattacctgatttttgccaggttgagagaagttagatttgattaatattgttaaattctatagcaactaaaatttttcttaatatttccttttggaatcacattctctttcaatttattgttgtaatttaatgtgtttttctacttttaagaactgttgggattgaccatttgctgacaacctgaaaagtgtcagttagttcactctctgccaactcctacagttgcatatgtactgcatgaacaggtggggtactagatactcttcactgttgttgcacatagaatattttattaatttgatgtcactgcaaaatgttcttcctccagaataaaagaagaaaggtctgcctattaaagtctctctagaactaaaaagtcaaaatggtagaaagcaacatcagatcaattctataaatatttaaattataattctcagaaaacacgagtaaaaatctaatggctcattggatggagaaggatgatgagtagtaaaggaggtgtattatttaaatattatagaaagtgtttctttgtagccctgtatgtagggaaggagagtatttgtgattgtataacttgttgctcttgatgagatactgagaaaccataaacgtaatttattttatttatgtattatatttatttttacattttttaaggctgtgaataagttggctgagatcatgaatcgaaaagaacctgtcaagcgtggtaatgacacagatgtgcggagaaaagagaaggagaatagaaagctacatatggagcttaaatctgaacgtgagaaattgacccagcagatgatcaagtatcagaaagaactgaatgaaatgcaggcagtaagaatactttttggactctagactgaagacttctttttaagaagtagaattattttcatgtctgtgttttactggttatagaccatttctatttaataattattattgaaccaagaagcaaaatgttgagttatgttgcatccaattaacttattgtaattaaatttcttatagcaaatagctgaagagagccagattcgaattgaactgcagatgacattggacagtaaagacagtgacattgagcagctgcggtcacaactccaagccttgcatattggtctggatagttccagtataggcagtggaccaggggatgctgaggcagatgatgggtttccaggtatggatttgttttcagcactaatatttatcttaaatataaatcagttgattgttttaagtcttgcgactgactgctctgaaggaaaaatgtttgtaatttctttaagggaaaacctactccttggagtaaggattcaagtaacatttcaaacttattttatttattgattttttttacaaagtttttcataaacatacaaaagaaaaactccacatgtctagtttttaaattattatattagctctatttttaagctttcgtttcattttctcttctttctgcattcttacttccttttatgttgggtgtttagttcatatcactcagtcacacactatggaatccatgtcattcacctaccagcgttcctctacttctctcaatattgccactaagccttccagttctcacacgctccttgactctgattctgactcagaagaagaatctttgccttacttacccatttcatcggaacctaatggtacaggtgatatcctgaaaatcttctcatctttggagtttttcccactacccttaattttagtccttttgaagattttttatgtaacattaactaataaccactaactctaatatgttgttgtagactcagttaaaaataaactgctgcatgaataaagaatttgtttttaaggtattttctcatggcattgctgttataattgatagatgccaacttgcgagaaatggagtaatacattatattgcttaagagcgcatggtttcactgcttgttttagccattttcaaccaagaagaaattcttcctgaagtttcataacaagagtggtggtacagaaaaagtacttcgactgattcaaaggatatgcttaaggtttttactgagtacttactgacattatcctaggcatatgtccttcataagaaacatgaaagaatttggcccgatcgttaccctgaaagagattacagtttaaatgaaaacagcagagagttccgtcattcagagtcagaggcagccctgtgtgatctttcaagactgcagtttcctcatctaaattaggaaaataattcctgttctgtgcggtttttttaggattaaagagaatttgtgtaaagcatccagcacgattgatacataatagaagttaaataagtgatagctacttttactattagaataacttccccaaatgctatttcacatatttatttcattaaaagacattgatcaaatgtcattaaaacaaattccgaggattcatacacattccttagttgaattacaatgttactgattttgatattttggaatttagaaatcttttgattattttgctgcttattaaccaaattttatctaaaatgtacgtaattggtcaggtgtggtggctcatgcctataatcctagcactttgagaggctgaggcagacagatcacctgaggtcaggagttcgagactagcctggccaacatggtgaaaccccatcgctactaaaaatacaagaaatagctgggcgtgctggcgcgtgcctgtaatcccagctacctgggaagccaagttaggagaatcactggaacccaggatgcacagcctgcagtgagccaagattacgccactacattccagcctgggcgacagagcaagactccatctcaaaaaaaagaaataaaataaaacaaaatttacattattttattttattatagttattctaaaagtccattttctctgaacacgtaattatttaaaatatttactccttgaaaatgtgcacaatgtggccctcttccaaaggaaaaataaaggagtctaaggcaggtgtaccagtgagaatagagagttgctgctgctgcctttttttttttttggcaacttttctcctgaattttataaatgcatgaatttaatcaatggaacatttgactttataaaagtatagactatctgtttccaatatgatataacctggattttgttttgcattgcataactttttactactgatcctgtactattactgtatcctagatgatgtatagtgataaattctaaaggatatattttatttgttttataaatttcatattaaaattttattaagttctttgttatctaaggagaattgttatctttagcctcacatgttgtgcttatttgtagaatcaagattagaaggatggctttcattgcctgtacgaaacaacactaagaaatttggatgggttaaaaaggtaattgatactttggaatatgagccttttgtttttgtttttgttttaactctagtcatttggcttttgtagttgtaggatatacatgactggtacctttagacacatagaacttgtttatacttcaggatttgaaatgatatgattttatttatctttgtaaaaaatttttgtcctcataccttgttaataataagacagattttattgttaggaaattgttgattttgatacttttgctgttttgttgggaaaagaactgtgaatatagtaaaaaagacccacttatttattttcctctgttactatgattattgatgttattatgtttatttttgagaaggttactaatgatgttggatcccaaagctaagtccaaaaaaatttgactttacttctccccacagtttgcttatttaaaatatctattaatataaacaaaatttattgttattttaaggaagactgtcctaaagatatattaaatactttttagttacttagtattttatgatttttattgctaatatagaatttattttcaaaaaaatcaataaataaggtatataaaaacttgaattactgatttcttttctccctgttttaacagtatgtgattgtaagcagtaagaagattcttttctatgacagtgaacaagataaagaacaatccaatccttacatggttttagatatagagtaagtgtttttgttagaatatttagaaactatatcttttaaagtataagagactaacaatgcaatttattagtctcatagtatagctcctactgtaatattgttacattttcctgtgatttgcttcatacagatgaaagtctgggatacagggttagttaaaacatctttatttcatgggcctttgatacattattttttgaaactaattagaaaatttctgacatagaggtttctaaaaatcttaattaattatagaattaatagaacaaaatattctgagttcctaacatgggtcaaagtagtcagtgtttaacgtctgatgtaagtatagaataattaatatataatttgatccttgggtgatattttattcctttattcaaaattttttatagcaagttatttcatgtccgaccagttacacagacagatgtgtatagagcagatgctaaagaaattccaaggatattccaggtaaacatagttttgtttatatttggttggttggctttgttttgtttttttcacatttagaagttctcaagtgacatgacatgttaaatctcttcattctttgaccctcttcaggttacctttatgtttcagtcctatttaaagatggtttgttgctttgtgacttttgtgcttaattctgtttgggaacgttttcattcctttctccattttatttgttaaagcttgcggtgtgtttgtatcatgtttctggtctttgctatatttttgtttaaggttggttatgacttttttttaaacatgaatttttccctttctgtttttgtttaatctcagctctctagaaagttagaaaagtcagttatggaggtaaattttgtaccttgtagcccttttacctccgatttaaagtgaagccacattcttccctttactacttccattttaaaattagtcaaaccaacaatgacttactgatttccttctatgtaagagtcgttgtgcttggtgtactgtgtggaagttggctccttgttttctggatgcttgtcatgtttatttggagtttaatacacatcctttcctctttcttttctctctcaactctcaaaatataggacttttaaaatgaagctgtgctcatagctgttacccagttttctgttaagtattacaaaacaccaattagtgtgattgccacatttcttcaagtgattattttgaacagtctctcccagaaaaacttcctaacacctatgaagttaccttttgctgacctattctgatagtgctgctaaagcatgggtgttataaagaaaataaggaggcagcatttgaacaggatcagttcttttgaaatgcaaaccaaagtgactgtctgatgacttttcttatataagctcttgattaagtttgcgtaatcaagagcttaagtttgtacttcagatacattttcttctctttgaataatttaggctaattttattttacttacactatcagaattgttcctacataaaaaaatagcatgtttggaaatcacttattgttcttttggcattcatagattctgtatgccaatgaaggagaaagtaagaaggaacaagaatttccagtggagccagttggagaaaaatctaattatatttgccacaagggacatgagtttattcctactctttatcatttcccaaccaactgtgaggcttgtatgaagcccctgtggcacatgtttaagcctcctcctgctttggagtgccgccgttgccatattaagtgtcataaagatcatatggacaaaaaggaggagattatagcaccttgcaaaggtaaatgataaattacttgctccatcgatattggttatgttcagatcattttaagcacattaatttttttttctaatttttctttatagtatattatgatatttcaacggcaaagaatctgttattactagcaaattctacagaagagcagcagaagtgggttagtcggttggtgaaaaagatacctaaaaagcccccagctccagacccttttgcccgatcatctcctagaacttcaatgaagatacagcaaaaccagtctattagacggccaagtcgacagcttgccccaaacaaacctaggtaataaactaaaatgtggtaaggaaaaaaaaaaagtctattaaaatattttgctatttatgttcaaactacaaattttcctaattagttttcctttgctttgtattttagttaactatggaataccaaatgttggaactgtcttaatgtgcatgtcatgttcatcgattcagatgaaagtaatataaacttacttactaaatcacacacatacagtaaattcaaccaaaaatctttaaagatttttgttatgtttatttgtacaataaatcctcacttaacattgtccataggttcttagaacttacaactttaagcaaaataatggctggtcctggaattaagttgtttccttcaaaattgttctgttataaccttgatgagaagaaaatggttttgttatacttcatttagcttaaagtcatactttccaagaacctgtcgatgatgtccagtgaggacttactgtataataatataattttcagcttttataagcacttgagtaatttaataacttaaaagatagaattaacattgtacacagacctcacattgtcaagtgcacacactgtgtttcatattataagcttttattatgttgggtgacttgggaggcaggtttaaaatcagcttaagttttaaatcaaatctataaatttaaaacagtaacttgagtgtgattttaacagcaacatagaccagctttaaaaatgcaaatattagctaatgggtaaagtggttattccttggaattgaggtagagttaggaaaatggagtaaggtcagggatgatcattatgcacaaaaacattttgatggagccattttcggatagctatgtgaaagtcctttagttaaatatcgtgattcacaatagccatttcttggcttactaactacttcagcatttataaacattgctatccattgaacatgaaatgaacacaagaatttggttagctaaaggaaaaagcatatcctttgatcaggtatctgatttcaggtatccttttggttccctaacacaggaccttcagtatatgaatattgatagcattggctgtattgtcagaaattctaatcacaaacatcttagatgaaactttctgaaactaatctctcaaggaaataatttagaatgacaaaggcagaattggtgtttcagcagtgaaaatgttgaatattttgtgtgaggtatgataaaactaaacaaaattaatgattattgactaaagctaaagaaactcagaattcagagacactgaaggccatttcaagtgccttctgtaaaacatctgaaaattaaatttctattattaatattgtagaactattaatgcttaaatggtattttaataccttatagtgtgtagtgatttcagtttccaaagtacttctctgtgtattcttttctctcatttaacttcttatatattatctcatttgctctttaaaatagtcctatggaatagaataggtattgttatatttgtttttgattaagactccagaaggggtttgtctagatctagaactataataactccaaatatccttttgatacatttttttcttttgtgctatttgacacattaatgatttcactacatacgataacatatatggaattagtttatgaggcacgctcccagttatgtaacaggctgtttttatgtacactgacttacaaataccttcctttcccagtccaaatcagcattatggtctatttgagagtacatttacttttgatttttgttacttttttttttttttttaaaaacttctggccttgccctgtgaatcattcttcattgatttttttaaaaaacacattttgtcatagcaacggtaagtagtaaggatttctttccctcatatctgcatgtaaataaaactaatatcaaaattgactgtaaaatgtgtagtgtatattttgtgaaaaaattcatttaatacattctttgaaattctaaacataaaggtggtcacatttataatataatttggattttgttgtacatctgcaacattatttccattgtttttggcatttgagtctccattgtttcatgtactcctagcattgtgtctgtatctcttacatgaatcaatcaacctgcattttattattattattattattattgagacagggtctcactctgttgcccaggctggagtgcaatggcacgatcatgactcactgcagccttgacctcccaggcccaactgattattctcccacctcagcctcccagagtaggtgggaccacatacatgcaccatgacacctggctaatttttttttgtttttattttctgtagagatgggggtctccctatgttgcccaggctggtctcaaatgcctggccttaagcaatcctcccacctcggcctcccaaagtgctaggattacaggcatgagccaccacgcctggccagtattccattttgaatgtcacattttaagagtcacttatacaaattgaatggtatatagatgagaataacagaggttgcagtatgtcatttgaaagtattatgtagcaagcgaaggaactgaggatattttgttctctaaagacattatttgaaagtgtgagagatcataaatagcactaaacagttaaagaccttttccttggaagatgtattagaagaagaaccaatcagagaggcaaattgtaaatctcattgagtagcatggttccagggaggaatcaagcctcaggctggatggtttttaacattctactggactaaagcccattcagtatacaaatgggtggaaatggtaaagggtcatccaagaaaacagaggcacagaattgctggtgtgtctcagcagtgatctaacatctagctgttcatttgagtttgtttaatattagtcttagcattagtcaatctagctttagttgaactaatttgacatggtatccttcttaaaacaaagtttggctttgttagatacatcaaatataaagtgaacccataaatgttcacttaaccatttttggtaacttttcctctgtgtctttctttgtggtcatctgccattacatcattacatctttttctcttcttttttctttttttttgtgacatgacgtctcactctgtcacccaggctggagtgtagtggcgtgatctcggttcaccctaaccctccaccttccaggttcaagcaattctcctgcctcagccttctgggtagttgggattacagacatgcaccctacaaaattagcactttgggaggccgaggcaggtggatcacgtggtcaggagatcgagaccatcctggctaacacagtgaaaccccatctctactaaaaaatacaaaaaattagctgggcgtggtggcaggcacttgtagtcccagctactcgggaggctgaggcaggagaatggcgtgaacccgggaggcggagcttgtagtgagccgagatcacgccactgcactccagcctgggcgacagtgagactccgtctcaaaaaataaaaataaaaaaataaaaataaaataagactagaaattaattgacagttcataaaaataatgtatagaaatgctattctacaggaatgttttcttggtacttttgaattaaaattaaaatgccatactggaaaagtaggaaatttgtgaataaaatgctaatttttgatgaagacaatttggggagtcctaatttgtttcaatgcaagataaaaatataccagtctgggctgggcgcggtggctcacacctgtaatcccagcactttgggaggccaaggcaggtggatcacctgaggtcaggagttcaagacaagcctggccaagatggtgaaaccccatctctactaaaaatacaaaaattagccaggcgtggtgtcaggcgcctgtaatcccagctactggggaggctgaggcagagaattgcttgaacccaggaggtggaggttgcagtaagccgagatcgcaccactgcactccaacctaggcaacagagcgagactccgtcacacaaaaaaaaaaaaaaaaaaaaaaattatataccagtttggctagagggtatttctctttaattatttttcttttaaagattttttttaacgcagtatttaatgcatgcagaaaagtataaagcaaaaatgtaacaaatgctcacttaccgagttttaagaagtgtaaaacatggcagcacagttaaaacttaaaggaggaagtagctattgtgtcattattatcttatctttgctcttcctcatttctaaatgttaaagaattaacagtctacttgggaaaataatgaagttatatacaatttgaagtgtcaaaaataaatccataggtgaatatatacctgatcttgaattggggaagaacttccaaataataaaagcaaagaaaacaaagccaaagatcaactaccccaaaagtaaagccttgtaaatttaaaaaacaccatgtatttccaaaatatatgagaaagatgagttagtatcttcacatacgaaaagttcttataaatcattgagaaaaaagattgcctcatccccatacaaaattaatgaggcgcatgcaggcattattatggaaatagctgttaaatgtaaaaaaaagtgatcagcctgattacagtagtccccctttatctcaagggatatgtagtccaagacccccagtggatgcctggaatcacgaatagtactggaccgtacacatacaattttttaaaatctgataatgaagaccattagtaagtgactaacaagcatggatatgctggacaaagggatgactcacatcccaggcaggacagagtgggatggcacaagatgtcatcacgctgtttacaacgttgggcagtttaaaacttctaagttgttttgagcttttctatttaatgttttcagactgtggttcaccactggtaacttgaaaccatggaaagtgaagacaaggatatggggggactactgtattaagaaattagcattaaattaaaactataacataaaaccatttttcacctgccaaactggcacgggttaagaaacgaaatgggtacttttgtggactgctggtagaactccaaattaaatgcactctttccaaagcatctttgacaataagtttcgcaggcctgaactatatccctgttaatggtggagacagtcaagcaacaggcaattacagtactatgtaaaatgctgtttataatatagggatgaacagagcgcttggggaaacgagggaagcatggagaattctgcctgaggacattaagaaagatctcaaacaatggaggatggataattttacaagcagacaaataagggaaaatcagttccaagcaaaatgtcatgtgcagaggtacaaagtcatcagaattacttatgtatttgtaattttgtgttggcttggcgttgggagaaggcaagggtagggagtggtaaaagatgatgtgacactagagagaaagtctgaacccaactgaaaagctccatgtacactgtgctcaggagttttgatttataagtagaagtctttcagtaagggattggtattcaggcttaatgagatcctgaactgagtacttgacaatgaaaacgaagaaaataaacctggatttggaaagatttcttcagttgaaataactagaattagatgactgattcgaagggatgagggagagggttgtaagggaagtctcgtcatacactacagtcgcatctagcgattagacttaaatttgagattgtgacactggcacacacttcaaaggttttgaaagggtatgcaatgcagctttctcctaacctatgctaaagctgaggcttggatgccctggaaggcctgctgatcacaatctcccaagcagtagagctgaaactatggctataagttacattatatataagtctagagaagtgagtgtgtgccaggttgcgatatgtgttcagtgagtaattatatctgtttgtgtgttttctcaaatgttgtgctgtgtttagcacattttaaaagagtaatttgagtcgctgtgtttattttaaattagagtaatcatccattaacctattctgtcagtgtttctcaaagttaaccagctgtatcagaaatcgcctcaggttttttatttgaaaatgcaaatatttgggcccttttcagtcatatctaaatctcttggaatgaggccttataaagagcagtaggtaaatcatatacactaaagtttcttactttagaagtgtgtaaataagaaccactgacaatagtgattacaggtgagactttggggaccagatgagttccttggcacaagttgattcatgaacaccacagttttaaaaatgaaaaagttactgcttttttttattatttatttatttttatttttatttatttattaattttttgagacgaagtctcactcttgttccccaggctggagtgcaatggcacgatctcggctcactacaacttccgcctcctggattcaagtgactctcctgcctcagcctcctgagtagctgtgattacaggcacctgccaccatgcccagctaatttttgtatttttagtagagacatggtttcaccatgttggccaggctggtcttgaactcctcacctcaggtgatctgcccgcctcagcctcccaaagtgctgggattacagacgtgagccaccgcatctggccaggtggctatttttaaaaacaaagatgatagcaatattacagtttaggttattgaattagaaagaaaagaccacatatatcccaactctaagtccaatttagccaagatgacttgctaatgctacttatgtacctgtggcttttcccttgtccctagtttttcatatgcaggacaaagctcttggtgacacattgagcaggcagggtcctactggaattcagaaagctgctttcttattctattactccctttttaccccatggtttttggtgctatgatggaaaaactgagctgacaatctgaccactttggtgaaggggaacattgacaaatgtgctttcataattctcaaatcaaactgggcatcaggatggttatgtgtttatctggggtatgggagtgaggagggagaagcagattgtttcttattatcccaaatatgatcgctgtcttcaaatatctggaaagtgtacttggccaacatgattatatgcatttatatataaagggcaaggcttccctatgtgcgtccgtcttaattttaatcttgttgttatccatgaagggaaaattaaaatgcttacaagcacattcaaagtatgatttctaagtcataacattaagttacagtttctaaagagtgttagagtataaatttacaaacctcctattgcagattgcttgatttggcatttaaagactgggattggtcatttgatgatgttgatggtggtggtgatgatgatgacgatgtttttgatttctgaagaaataaatggggtaaatcaaaaaatgaaaaatcagttattttagtacttcaacgtagtgcatgtggtttgccacttgggctttcattattttttatttttgaaacttgtttttaatagtatatagttaaaagtagttttcgaaaagttgctaactgaaatttacatgttaagtgtaaaagtgaaatgctatgttcagattctttattggctataaatttttagtacaattagaatttatcttaggaatgagatgtagaaatcacaaaaggagttaattctgatacgttctgttcattccaaagaagccatattcagaagagaagtaaaatttacaacgttttcaagttcctacagctatattagtttgtgaacatagcatgagattcctttctccatctctctccttttatttccaacttgcaagaattgaaagcataaaaactttataagtctaataagtgctgtgaaatagctatttctgatttggcatttttgtgtgtggtgctgtgaaatgtttgctttgtgagaatttaatgttacccttgctgaagaatgtcagtgatacgctgtgagaattgtgcttttagaaaatgtaaaatagtttggttaatagtggctaaaggagatttgaatgaaagttgagcctcaagttaaaccttttacatagaaggatttaaaagaaataatgtgtgttttagtctaagtaagcaagttgcaaaacataaatcaggtagtactggtatctatttataatcagatttcatagagtagcttgtatatatttactacaacaatgtagttggtcctatcttatagaaaaacaaaatgtggcttagggttgaacagccaagtagaacctgatcaataggcccatttccctttcagctacatgaggcagctggcagttaaaccccaaatcaaactttatcttctaagttattctgtggtatattgtttaaccctaatagcttgttaaccatattaaaatgtgtgtgtaatgtgtgtagctaatattccaaaatcccaagttgttttgggaaagaatataattgcatgttgtacctataggaaaagtaatacagtaagtatgtttatgcatgattttagtgttaaaaaatatagtagctggaagactatatagtttaataatgtgaatggaatgctttttctaggaatttaacactcttaaattatttcactgtatcaactaactttatttttcctttcttttcagctaactgccttctatgaaagcagtcattattcaaggtgatcgtattcttccagtgaaaacaagactgaaatatgatggcccaaaatttattaaaaagctatattttcctgagagactgatacatacactcatacatatatgtgttccccttttccctgtaatataaattacaaatctgggctcctttgaagcaacaggttgaaccaacaatgattggttgatagactaaggatatatgcaactcttccagacttttccataaagctctctcggcagtcgctcacactacaatgcacacaaggattgagaagagttaaaggctaaagaaaacatcttttctagcttcaacagagaggtttcaccagcacatttaccagaagaatctgggaatggattccactacagtgatattgactgcatctttaagaagtgaccattatactgtgtatatatatataaacacacacacatatatatatatatatagtactctaatactgcaagaaggttttttaaacttcccactttattttttatacacattaatcagatatcattacttgctgcagttgcaactatgcacttgtataaagccataatgttggagtttatatcactcattcctgtgtacctgatggaagttgcatgttcatgtttaagcagttactgtaacaagaagtttaaagttaattatatcagtttcctaatgcttcatgataggcaactttacccattttgaatgccttaatttaatttttttcaaagtctcagccctgtctgtattaaaaaacaaaaaaagcgtttaccagctcttaggatgtaaactagctttgtggaagataaatcgtgcactatttttacacataaatagttatatcaatgtcagcctattttgattaacaaatgtttttaaagtattattggttatagaaacaataatggatggtgttggaactaatatatccttgatgtctgtctattattcattcaactctttttacagacctcagtattagtctgtgactacaaaatattttatttgctttaaatttgctggctaccctagatgtgtttttattcctggtaaagacatttgtgattacattttcacacttaagattcaaaatttttcccaaatataaagaaaactaagacagactgtagatgcattttaaatatttaaatatgatcctcagacatgcagctgtgtgtggcagtattttagtaccgggttaagaaaactggcaactgggaagaagtggcctcaaaggcacttaatttgatttttattttttaaatgctgtcaaagttacagtttacgcaggacattcttgccgtattctcatgatcccagataagtgtgtgttttatactgcaacaatatgcagcaatggtaagcgtaaagttttttttttgtttttgtttttttttatattatgaagtcttttaacagtctctctttatataaatacacagagtttggtatgatatttaaatacatcatctggccaggcatggtggcttacgcctgtaatcctagcactttgggaggccaagacgggcggatcacctgaggtgaggagttcaagaccagcctgcccaacatagtgaaactccgtctctaccaatatacaaaaattagccgggcatgatggtggtggcctgtaatcccagctacttgggaagctgagacaggagaatcgcttgaacccaggagacggtggttgcagtgagcgaagatcgagccactgcactccagcctgggcagctgaacaagactccgtctcaaaaaaaaaaaaaaaaaaaagtcatctaatatttcgatgaaggaaatagacatttttcattgattccctctgatgtcagttagagatatttaaaaagttagatccccataatagatactattgtggaaactgaagagtagctactggcctactgatagactgaaactggttttgttattcttaacgttctccagtctgcactctgctgtgctgtctgtgctcagactagacgtgcatgccgtttcctttgcaggtgtgttctgcagctctggttttgggggatagctcttttttaagtaagattaaaaaatgaaaaatatataaatttatatagaataaatatttccattcattagagttgttaaaaggagactgaattaatattttatataaagattttgttacattatgggaggttctatcctattctgaattggagagtatatatatatatatatatatatatatatttttaataaactttattaaggtgaaataatttcaagtttacatatgagtaactgaaatatttgagtaaaaaaggcaaaagtttaaatttggaatgctgtatatattagagaatatggggaatcatggtgtgaccaactgtacaaggaagattcatatgaaggtcttaggggaaaaagataattctgaagggtgaaaaaaaaatctctcccatggagattcttcacattatatggtttgacataagggtttataaggttgtttgtccaactaatgaaaatgcgcttaataaaaaattctgaccttgggtaagaattcgctttttaccgcattgccgctttcatgtacatacatgagtgcatgcacctatcaatgtgttttcttcccaacacttattaaatataaaacaacctgattttgtgctcgtttctcgtttttcttgaggccctgaagcttccaagataaatataagactaaaatttgcttgttccttcacacctgatttctcctagaaccataaatacctcctatggggaactaagaaatcatgaatactgggattttcttattggattttttacttttgttttgtggggataacgagacagaagtgaaaggaaaactggtgccggtattactgttgaaattaatgtacagtgaatgtttttaaagtattaattttaaaaaaccatgttctctagaaacaagttttaaaaatctatatgaaagttttaaaatgttccagctaactaatggataagcataccagtaaagccaaagtaaaggttagtgcctttaaaactaacctgtgttagagttacatgaatctggctctaaagtatctattttgcatccatttatatatagatcttaaacagaaatactctaggttgccacaccacagttttaagaagttatgctgctgctgttactctcttctaggattctggtggtaaagtagagaaactcggacactatattaaccttactgaaacatgctttaaatcgtgtctaaaatctgatttgagcaagtcactgccgagcttctgagtctgcattgacactgctactgactcacctctccttccctggaataaggcttcagcttccctatgctgtgaagacaccatttgtaagcactttgaacataagcactgtgtgacagcgctggatatcatgcttgggggggggcctctccctgactcccatccccataataatgagttttgtttggaattgtaataagtaatgaactgcatggtttagaaaattataaatatttgatcagctgtcctctctgaaaaaaattgcacccctttttcttttttaaaattttgttgcatcttcgtagtaatgtaattgtattttatgcctgcttttttataaaaaaataaaataaaataaatggagacataagcattttcatacttctcctgtgaaatagtcctggaatacggcaaccttctaaagtttacccaaaacatttgctttctctataagatgggtataaacagtgggatgaggatagtaaataagtcttagaactaaggctgtagacttgtgtttcttctgccctatgatttaattcatggagaaataccaaatttcaaccaggagcctgtctctgatctgatttgggtgttttaagacgcacgcaaataatagaacaaactcatttgaattggtaaggatagggaaaagaggcaggatgtctgttttgtcaggaaatagtgtgctgattgattgataggtgattttctagaaagtgtttctctggcaatcagtggaaccttttctagggcacttatttgctatgtgctcttgggcaggttattcactctgagcctccgtgttttcatctgtaaaatggagatatagattgtgtctactttacaggatcactggcagattaagtaagtatgatgtgtgtagaatgtctgagatggctcgagtgtttgttgccttacaaagggggaaaaacagagaccctgtcacctaagtatgctcttaaaggagttgctttaagcagtgataaagtactaatgttatctaaataaaacatttgttggactaaaaatcatataatttgtattgatgctaatggtcagattataactgcaaatgaaaaaagattaacttgcatgtttaaaaatatgacatctgtaattttaacaactacagaatgaataattttgtctttagataccatgtttctcttcctgttggtcccaagcagtagttctaaaaggattaaccagtttgtttaaaaactataccttacataaaatagtcatattaatgattgacagttttaagactcagcagaattcaaaatatgaaaatttattttgcataggaaacaataatctctggtaaacatcattactgcatctaacaaaacaatgccttcaattaaagggggaaagtgagtttttaaacattagggttaatttagaagaaaatacagtatataataatctcaacatcatgtttagggtaaaaatgctataatgtgaaaaaagtccctaagaactggacagaacctacctaacaacaccatttaccgtgtatgttttcaatagacaaaacatattttgtaccaaattccaacagtggtaattctatagttgtggccctttaaaaaatggcagcattgtacttgaatcagaaagcttactgggatttcctcatcgaaagtagagattgcagctaatcctagtaccttttgttagtaattacttaaggcacagtgcaaagttgaaggactgttttggtacaaactcaagccagctacatgtatgcttgccttggtatccttgctagagcacatgcaggtataataccgtattatacacaacaaggccaccctgttgtatctgtgttacaattaaacatcagtcccagaaagtgaaccctagtcatttattataggtgcccacctctgacttggaacaaaatgccactccattcatgttcatttttgtcctggagaggatttatttcctaaaagattctgaaagccaacaaatcaatgtagttcttcatagagaacttaagagtaaggctcaaaatggcctcaaaatgggcttcttggatgacttccaacagtgactggcctcaacactgcagatgtctgagcactaccataacctaacgaagtgaggaaggaggaggcaaattggtatttttaaacaagaatttaagtggctctttctttcaagtctaaaaaaacctttggctttaaagattataaactgatttactaaatttataaaagaccttaatttagcaaagagcttctttttcctttggttcagttactcaaaatccactgtgtgaaggaataatgtatccatcattcagcctttatagcggtcttccggtagcgaagtactgtcactgttacccatatatttaaagccagcatgatcacaaaacgtagaagaactgaaataaaaaaaaaagtgtattaaaaactgtctttacaatacagaccaaaaccacctcctgctcaaagtataagcctaaataaagcttcacccccaacctccgaaatgaacaattttggttccagttatttctggggaaatgatctccctatcatgacaatttttggccccttggcccaacttcataaataataatttatcatcttaagtgctcaattgacagtaatgtggctctggctaagaagggttataacttttaactttttttttttttttttgagacagtcttgccctgtcacccaggctggggttcagtggcctgtcttggctcactgcaacctccaccttctgggttcaagtgattctcccgcctcagctccccaggcacctgggatgacaggtgcccaccaccacgcctggctattttttgtatttttagtagagacagggtttcaccatgttgcccaggctggtctcaaactcctgacctcaagtaatctgcccaccttggcctcccaaagtgctgggattacaggcgtgagccactgtgcccagcctaagaagggttataacttttaaaaatccctttactcatctgacgtcctgagggtgctgctgtctcagaacgttccatattaagcaagggtggtttaacatactctgttaagatcatcctgaaaaactggcccacaggacaaggcatattttatattcaagtaaccatgaaaatgtgtctctttgtggaaaaataaataaataaatatatataactttaacagtgacttaacttctactttaaggtacggatacactcctgataaataggtttaatgagatttaagatatctttgtgtttgaaaaacacatgtaagattttagctgaactgtttttaaaaagttattccctggccgggcgcggtggctcacgcctgtaatcccagcactttgggaggccgaggcgggcggatcacgaggtcaggagatcgagaccatcccggctaaaacggtgaaaccccgtctctactaaaaatacaaaaaattagccgggcgtagtggcgggcgcctgtagtcccagctacttgggaggctgaggcaggagaatggcgtgaacccgggaggcggagcttgcagtgagccgagatcccgccactgcactccagcctgggcgacagagcgagactccgtctcaaaaaaaaaaaaaaaaaaaaagttattcccaggccgggcgcggtggcacacgcctgtaatcccagcactttgggaggctgaggtgggcggatcacctgaggtcaggagtttgagaccagcctggccaacatggtgaaaccccatctctactaaaaatacaaaaattagttgggcatagtagcgcatgcctgtaatcccagctactctggaggctgaggcaggagaattgcttgaacccgggaggcagaggttgcagtgagccaagatcacaccactgcactccagcctgggcgacagagtgagaatccatctcaaaacaaaacaacaacaaaaaagttattcctggatatactgatcactttcaagaacagctgtcatagataagaaataaatcacaattagaacaatcttgatcttttaatttctaatgtataggttttgctgtttacttgtggtttgactttcctttccatgctgagaattcaagtcctgtggaaagacccaagcctgtcttccttcccatttcccacttgatcaaagtttatgctttgaccagaacaattttagtcctatcatcagagctgacaaaaagtattcgagcaaaggtataacctccaggaagagactaacaaacatatctctgttctgaagcactatttctcaaataataattagctcatttaaaaggtctacatgctggggacattttctgatcttcacaggtgacaccatctgttctaatcattttccaaagatgtataatatatgcttgatttgggagttgaaaacagcctaaggaattactaaattcttttgtggttaaccatagtatttcctcctccatgacagctttttcttttaaagaaacagaacaaaaacatagtccattggtgacaccacttccctgcttcaaagcctccagagccttcctactgttttgtaggcagttcttgtaggccctggatacttgggccactgccagtctcgcatccttcctctcctgaaacccgcttgtcactgtccccctgctctccgcactctagccctttgtccttcgctcatgaccttcacaatgctgctccttgttaagagtctggcctccgcccacatcctttcctctggctaaacctctactcatccttacgatcactcttcttcaaattaatctgcccaactcctgcaaactaggccaggttctccttagatgctcatcctgccctactcttccaaaccatgtcccattagaattcaatagggaattgtgtgattacctcatgtccaattccactgcttaagtggaagttccatggagataggaatctattgtcttgtgcatagtctatcccctgtactataagaaggagaggcttaacaataaaaatggtgaccaataagactaggaatacattgttgccatcttctaaatctataatccaacagagccaagtccatccattaaaccctaagacagtttacaaatgaaggagacacaaatagcacaaaactcaaaaaggaagtgagaagatattttgcttacttgtaaaatcattggtggtcattaaggttgtgattattcttgctgtaaaagaaaacttgcagcaataagtaacttgcctctcggacattttggggcttagctaataatgtctttcccttttaatatcccaatatatattaaccattatttttaaattatttttattctttttttaacaacatatattaactattcttgacagagtttggtagtacagaaaaccaaatagtgctgtatttcataattacataaaaactagccatgccggatcacctgaggtcaggagttcgagaccagcctggccaacatggcaaaaccctgtctgtctctactgaaaatacaaaaattagccaggtgtagtggcgggcgcctgtaatcccagctactcaggaggctgcggcaagataatcgcttgaacctgggaggcaaaggttgcagtgagctgagattgcgccaattgactccagcctgggtgacagagccagactccgtctcaaaaacaaaacaaaacaaaacaaaaaacagccatgcatcctaccccaatggcccaatggttttgaaactgctcatgagggaaggtacctagaaggtactcgagcgctgcctgcggaaggccggagagactgagctcccttccactgtctctgtgctaacctgcaacccccaaccctccaaaagcaactctcatttacaaattgagcatctgggtagttttatttaaagaaaggctcccactaattaaaaacaatgttttggccaggcacagtggctcacgcctgtaatcccagcatttcgggaggctgaggcgggtggatcatgaggtcagaagttcgagaccagcctgaccaacatggtgagaccctgtctctattaaaaatacaaaaattagctgggtgtggtggcgggcacctgtaataatcccagctacttgggaggctgaggcaggagaatcgcttgaaaccggaaggctgaggttgcagtgagccgagatcatgccactacactccagcctaagcgaaagagcgaaactctgtctcaaaaaacaaacaataaatgttttcgaatcactggtttctatccttgcattttatagataaacagactgaggcccagaaaaggggaagatttttccaagggtctaactagaactattttgtttagtttatttgtgtgccatagccctttacttagtaaacatttaggaaattggagtaacagtttaaaccgacacacaagagcagggagtggcgtgacttgggagttagagaagaccactgcctgcagctcaaggcatgcctttcctagcccaaaaccagcctgtcaaaactctctgctaacacattctgcatttagcacatattgacatagaagttttttggtctaccttccaactaaactgcaagcccctgaagggcagaggccaaatcctataaaatgttttgttgacacatttgataaaccaagactttacacacagacaccacataaatagttgttgattaaatcatcatttaaataaaagaattcaatcatataagtagacagaagacttcagttaggaaggcggccaacaaaggactctcagacaaactttttaaaaggctgttaataaccacacatctgacaagggttaatgaccagaatatgtaagaaactcaaatgacccaattaaaaaatgggcaaaccatgtgaacagacatttctccaaagaaaacatacagggccaggtgcagtggctcacacctgtaatcccaatactttgggaggctgaggtgagatgaacacttgagcccagtagtttgagaccagccttggcaacatagtgagacccctctctacaaaaaattggctgggcgcggtggctcatgcctgtaatcctagcactttgggaggccaaggcgggtggatcacttgaggtcaggagttcaaaaccagcctggccaacatggtgaaaactcgtctctactaaaaatacaaaaattagccaggcatggtggcgtgtgcctgtaatcccagctactcaggaagctgaggcaggagaatcgcttgaaccttggaggcagaggttgcagtgagccgagattgcaccactgcactccagcctgggtgacagagcgagactgtgtctcaaaataataataataataattaaaaattagccaggtgtggtggtgtgtgctcgtactcccagctacttggaaacccgcagtgagtgaagatcgtatcactgcactccagcctgtgagagagagcgagaccctgtcaaaggaaaaaagaaagaaagtcttgattttaagacataattaagacaagtaacttgttgaatataaagaccagcaaccatggatggagacattagccctttaagatgcagaagaaccatgatgaagtctacttaaaatatctaaaactagtaaatccaactaatgtgatagctctgaattataaaaatgtttctacctacatataccatatatgtattttaggtagtttttgtaagaatccaaatgaagagtgaaaattctaaagttgagaccaaacaatgtggctgccgaaaatctccatcactacacatttcattcattctcaaaagccactgtatgattttcatattttaaaacctgttatattcaaattcttaagataaattagtacattcaatataatcaacctctttatcctttcaaagaagacagagctaattaatatcaggccaggtttttggagaaaaataggctttcacttttttttttcttggcaacttggattttacagaaaatggagagcagtttgcattaaatcatctttgtaaacatggatacacttaggaggttctagctgagtagccatttgtaaagtagtaaagcgccagggaccatgttacttcaacaccaacttaacaccctactacatagacacttggtgctaccaaaggcctccccaccatgtgagtccggttcttacttgcacaggtataggaagagaggctccaagtcagcgcactcacagttcctgagtctctcgtcttccacagacactggagctgtgcaaacttactggccgcgctgatgaaagtacatagattctgtttgcagataaaatgtgagaaagtcacgagtcgatttgttaaaaaagcaaaagaggccaggtgcggtggctcacacctgtaattccagcactttgggaggccgaggcaggcagatcatgaggtcaggagatcgagaccatcctggctagcacggtgaaacaccgtctctactaaaaatacaaaaaattagctgggcgtggtggtgggcgcctgtagtcccagctactcgggaggctgaggcaggagaatggcatgaacccgggaggtggagcttgcagtgagttgagatcgtgccactgcactccagcctgggtgacagagtgagactcccatctcaaaaaaaaagcaaaagagcacgagatactcaaagcatttttgaagccaaattttcaggtcaaaataataatggaattgtacaaagttgaaacctaagtttagtgaaaagtaatgcaatagtgagacatttatttatttatttatgacagtctcactctgtcacccaggctggagtgtcaaaataataatggatttgtacaaagttgaaacctaagtttggtgaaaaagaatggaatagtgagacatttatttagttagttagttagttaagacagagtctcactctgttgcccagactggagtgcagtggcacaatcttggctcactgcaacctc

SEQ ID NO: 1526 - DNA, 5344 bp, Homo sapiens
ccgggctgggccgggcgggcccctgggagcagcccccaggcgggggaccgccttggagacccgaagccggagctagaggcaggcggtgggcccgggtggagtcccggccggagctggtggttcgggggcggtgctaggccccgaggctgcgggacctgagcgcgaggagcctgagtgcgggtccagcggtggcggcatgagccggcccccgccgacggggaaaatgcccggcgcccccgagaccgcgccgggggacggggcaggcgcgagccgccagaggaagctggaggcgctgatccgagaccctcgctcccccatcaacgtggagagcttgctggatggcttaaattccttggtccttgatttagattttcctgctttgaggaaaaacaagaacatagataatttcttaaatagatatgagaaaattgtgaaaaaaatcagaggtctacagatgaaggcagaagactatgatgttgtaaaagttattggaagaggtgcttttggtgaagtgcagttggttcgtcacaaggcatcgcagaaggtttatgctatgaagcttcttagtaagtttgaaatgataaaaagatcagattctgcctttttttgggaagaaagagatattatggcctttgccaatagcccctgggtggttcagcttttttatgcctttcaagatgataggtatctgtacatggtaatggagtacatgcctggtggagaccttgtaaaccttatgagtaattatgatgtgcctgaaaaatgggccaaattttacactgctgaagttgttcttgctctggatgcaatacactccatgggtttaatacacagagatgtgaagcctgacaacatgctcttggataaacatggacatctaaaattagcagattttggcacgtgtatgaagatggatgaaacaggcatggtacattgtgatacagcagttggaacaccggattatatatcacctgaggttctgaaatcacaagggggtgatggtttctatgggcgagaatgtgattggtggtctgtaggtgttttcctttatgagatgctagtgggggatactccattttatgcggattcacttgtaggaacatatagcaaaattatggatcataagaattcactgtgtttccctgaagatgcagaaatttccaaacatgcaaagaatctcatctgtgctttcttaacagatagggaggtacgacttgggagaaatggggtggaagaaatcagacagcatcctttctttaagaatgatcagtggcattgggataacataagagaaacggcagctcctgtagtacctgaactcagcagtgacatagacagcagcaatttcgatgacattgaagatgacaaaggagatgtagaaaccttcccaattcctaaagcttttgttggaaatcagctgcctttcatcggatttacctactatagagaaaatttattattaagtgactctccatcttgtagagaaactgattccatacaatcaaggaaaaatgaaattcagaaaaaactgtatacattagaagaacatcttagcaatgagatgcaagccaaagaggaactggaacagaagtgcaaatctgttaatactcgcctagaaaaaacagcaaaggagctagaagaggagattaccttacggaaaagtgtggaatcagcattaagacagttagaaagagaaaaggcgcttcttcagcacaaaaatgcagaatatcagaggaaagctgatcatgaagcagacaaaaaacgaaatttggaaaatgatgttaacagcttaaaagatcaacttgaagatttgaaaaaaagaaatcaaaactctcaaatatccactgagaaagtgaatcaactccagagacaactggatgaaaccaatgctttactgcgaacagagtctgatactgcagcccggttaaggaaaacccaggcagaaagttcaaaacagattcagcagctggaatctaacaatagagatctacaagataaaaactgcctgctggagactgccaagttaaaacttgaaaaggaatttatcaatcttcagtcagctctagaatctgaaaggagggatcgaacccatggatcagagataattaatgatttacaaggtagaatatgtggcctagaagaagatttaaagaacggcaaaatcttactagcgaaagtagaactggagaagagacaacttcaggagagatttactgatttggaaaaggaaaaaagcaacatggaaatagatatgacataccaactaaaagttatacagcagagcctagaacaagaagaagctgaacataaggccacaaaggcacgactagcagataaaaataagatctatgagtccatcgaagaagccaaatcagaagccatgaaagaaatggagaagaagctcttggaggaaagaactttaaaacagaaagtggagaacctattgctagaagctgagaaaagatgttctctattagactgtgacctcaaacagtcacagcagaaaataaatgagctccttaaacagaaagatgtgctaaatgaggatgttagaaacctgacattaaaaatagagcaagaaactcagaagcgctgccttacacaaaatgacctgaagatgcaaacacaacaggttaacacactaaaaatgtcagaaaagcagttaaagcaagaaaataaccatctcatggaaatgaaaatgaacttggaaaaacaaaatgctgaacttcgaaaagaacgtcaggatgcagatgggcaaatgaaagagctccaggatcagctcgaagcagaacagtatttctcaaccctttataaaacacaagttagggagcttaaagaagaatgtgaagaaaagaccaaacttggtaaagaattgcagcagaagaaacaggaattacaggatgaacgggactctttggctgcccaactggagatcaccttgaccaaagcagattctgagcaactggctcgttcaattgctgaagaacaatattctgatttggaaaaagagaagatcatgaaagagctggagatcaaagagatgatggctagacacaaacaggaacttacggaaaaagatgctacaattgcttctcttgaggaaactaataggacactaactagtgatgttgccaatcttgcaaatgagaaagaagaattaaataacaaattgaaagatgttcaagagcaactgtcaagattgaaagatgaagaaataagcgcagcagctattaaagcacagtttgagaagcagctattaacagaaagaacactcaaaactcaagctgtgaataagttggctgagatcatgaatcgaaaagaacctgtcaagcgtggtaatgacacagatgtgcggagaaaagagaaggagaatagaaagctacatatggagcttaaatctgaacgtgagaaattgacccagcagatgatcaagtatcagaaagaactgaatgaaatgcaggcacaaatagctgaagagagccagattcgaattgaactgcagatgacattggacagtaaagacagtgacattgagcagctgcggtcacaactccaagccttgcatattggtctggatagttccagtataggcagtggaccaggggatgctgaggcagatgatgggtttccagaatcaagattagaaggatggctttcattgcctgtacgaaacaacactaagaaatttggatgggttaaaaagtatgtgattgtaagcagtaagaagattcttttctatgacagtgaacaagataaagaacaatccaatccttacatggttttagatatagacaagttatttcatgtccgaccagttacacagacagatgtgtatagagcagatgctaaagaaattccaaggatattccagattctgtatgccaatgaaggagaaagtaagaaggaacaagaatttccagtggagccagttggagaaaaatctaattatatttgccacaagggacatgagtttattcctactctttatcatttcccaaccaactgtgaggcttgtatgaagcccctgtggcacatgtttaagcctcctcctgctttggagtgccgccgttgccatattaagtgtcataaagatcatatggacaaaaaggaggagattatagcaccttgcaaagtatattatgatatttcaacggcaaagaatctgttattactagcaaattctacagaagagcagcagaagtgggttagtcggttggtgaaaaagatacctaaaaagcccccagctccagacccttttgcccgatcatctcctagaacttcaatgaagatacagcaaaaccagtctattagacggccaagtcgacagcttgccccaaacaaacctagctaactgccttctatgaaagcagtcattattcaaggtgatcgtattcttccagtgaaaacaagactgaaatatgatggcccaaaatttattaaaaagctatattttcctgagagactgatacatacactcatacatatatgtgttccccttttccctgtaatataaattacaaatctgggctcctttgaagcaacaggttgaaccaacaatgattggttgatagactaaggatatatgcaactcttccagacttttccataaagctctctcggcagtcgctcacactacaatgcacacaaggattgagaagagttaaaggcagaagaatctgggaatggattccactacagtgatattgactgcatctttaagaagtgaccattatactgtgtatatatatataaacacacacacatatatatatatatatagtactctaatactgcaagaaggttttttaaacttcccactttattttttatacacattaatcagatatcattacttgctgcagttgcaactatgcacttgtataaagccataatgttggagtttatatcactcattcctgtgtacctgatggaagttgcatgttcatgtttaagcagttactgtaacaagaagtttaaagttaattatatcagtttcctaatgcttcatgataggcaactttacccattttgaatgccttaatttaatttttttcaaagtctcagccctgtctgtattaaaaaacaaaaaaagcgtttaccagctcttaggatgtaaactagctttgtggaagataaatcgtgcactatttttacacataaatagttatatcaatgtcagcctattttgattaacaaatgtttttaaagtattattggttatagaaacaataatggatggtgttggaactaatatatccttgatgtctgtctattattcattcaactctttttacagacctcagtattagtctgtgactacaaaatattttatttgctttaaatt

SEQ ID NO: 1527 - protein, 1378 aa, Homo sapiens
MSRPPPTGKMPGAPETAPGDGAGASRQRKLEALIRDPRSPINVESLLDQSLVLDLDFPALRKNKNIDNFLNRYEKIVKKIRGLQMKAEDYDVVKVIGRGAFGEVQLVRHKASQKVYAMKLLSKFEMIKRSDSAFFWEERDIMAFANSPWVVQLFYAFQDDRYLYMVMEYMPGGDLVNLMSNYDVPEKWAKFYTAEVVLALDAIHSMGLIHRDVKPDNMLLDKHGHLKLADFGTCMKMDETGMVHCDTAVGTPDYISPEVLKSQGGDGFYGRECDWWSVGVFLYEMLVGDTPFYADSLVGTYSKIMDHKNSLCFPEDAEISKHAKNLICAFLTDREVRLGRNGVEEIRQHPFFKNDQWHWDNIRETAAPVVPELSSDIDSSNFDDIEDDKGDVETFPIPKAFVGNQLPFIGFTYYRENLLLSDSPSCRETDSIQSRKNEIQKKLYTLEEHLSNEMQAKEELEQKCKSVNTRLEKTAKELEEEITLRKSVESALRQLEREKALLQHKNAEYQRKADHEADKKRNLENDVNSLKDQLEDLKKRNQNSQISTEKVNQLQRQLDETNALLRTESDTAARLRKTQAESSKQIQQLESNNRDLQDKNCLLETAKLKLEKEFINLQSALESRDRTHGSEIINDLQGRICGLEEDLKNGKILLAKVELEKRQLQERFTDLEKEKSNMEIDMTYQLKVIQQSLEQEEAEHKATKARLADKNKIYESIEEAKSEAMKEMEKKLLEERTLKQKVENLLLEAEKRCSLLDCDLKQSQQKINELLKQKDVLNEDVRNLTLKIEQETQKRCLTQNDLKMQTQQVNTLKMSEKQLKQENNHLMEMKMNLEKQNAELRKERQDADGQMKELQDQLEAEQYFSTLYKTQVRELKEECEEKTKLGKELQQKKQELQDERDSLAAQLEITLTKADSEQLARSIAEEQYSDLEKEKIMKELEIKEMMARHKQELTEKDATIASLEETNRTLTSDVANLANEKEELNNKLKDVQEQLSRLKDEEISAAAIKAQFEKQLLTERTLKTQAVNKLAEIMNRKEPVKRGNDTDVRRKEKENRKLHMELKSEKLTQQMIKYQKELNEMQAQIAEESQIRIELQMTLDSKDSDIEQLRSQLQALHIGLDSSSIGSGPGDAEADDGFPESRLEGWLSLPVRNNTKKFGWVKKYVIVSSKKILFYDSEQDKEQSNPYMVLDIDKLFHVRPVTQTDVYRADAKEIPRIFQILYANEGESKKEQEFPVEPVGEKSNYICHKGHEFIPTLYHFPTNCEACMKPLWHMFKPPPALECRRCHIKCHKDHMDKKEEIIAPCKVYYDISTAKNLLLLANSTEEQQKWVSRLVKKIPKKPPAPDPFARSSPRTSMKIQQNQSIRRPSRQLAPNKPS

SEQ ID NO: 1528 - DNA, 6539 bp, Homo sapiens
ccgggctgggccgggcgggcccctgggagcagcccccaggcgggggaccgccttggagacccgaagccggagctagaggcaggcggtgggcccgggtggagtcccggccggagctggtggttcgggggcggtgctaggccccgaggctgcgggacctgagcgcgaggagcctgagtgcgggtccagcggtggcggcatgagccggcccccgccgacggggaaaatgcccggcgcccccgagaccgcgccgggggacggggcaggcgcgagccgccagaggaagctggaggcgctgatccgagaccctcgctcccccatcaacgtggagagcttgctggatggcttaaattccttggtccttgatttagattttcctgctttgaggaaaaacaagaacatagataatttcttaaatagatatgagaaaattgtgaaaaaaatcagaggtctacagatgaaggcagaagactatgatgttgtaaaagttattggaagaggtgcttttggtgaagtgcagttggttcgtcacaaggcatcgcagaaggtttatgctatgaagcttcttagtaagtttgaaatgataaaaagatcagattctgcctttttttgggaagaaagagatattatggcctttgccaatagcccctgggtggttcagcttttttatgcctttcaagatgataggtatctgtacatggtaatggagtacatgcctggtggagaccttgtaaaccttatgagtaattatgatgtgcctgaaaaatgggccaaattttacactgctgaagttgttcttgctctggatgcaatacactccatgggtttaatacacagagatgtgaagcctgacaacatgctcttggataaacatggacatctaaaattagcagattttggcacgtgtatgaagatggatgaaacaggcatggtacattgtgatacagcagttggaacaccggattatatatcacctgaggttctgaaatcacaagggggtgatggtttctatgggcgagaatgtgattggtggtctgtaggtgttttcctttatgagatgctagtgggggatactccattttatgcggattcacttgtaggaacatatagcaaaattatggatcataagaattcactgtgtttccctgaagatgcagaaatttccaaacatgcaaagaatctcatctgtgctttcttaacagatagggaggtacgacttgggagaaatggggtggaagaaatcagacagcatcctttctttaagaatgatcagtggcattgggataacataagagaaacggcagctcctgtagtacctgaactcagcagtgacatagacagcagcaatttcgatgacattgaagatgacaaaggagatgtagaaaccttcccaattcctaaagcttttgttggaaatcagctgcctttcatcggatttacctactatagagaaaatttattattaagtgactctccatcttgtagagaaactgattccatacaatcaaggaaaaatgaagtacattcagaaaaaactgtatacattagaagaacatcttagcaatgagatgcaagccaaagaggaactggaacagaagtgcaaatctgttaatactcgcctagaaaaaacagcaaaggagctagaagaggagattaccttacggaaaagtgtggaatcagcattaagacagttagaaagagaaaaggcgcttcttcagcacaaaaatgcagaatatcagaggaaagctgatcatgaagcagacaaaaaacgaaatttggaaaatgatgttaacagcttaaaagatcaacttgaagatttgaaaaaaagaaatcaaaactctcaaatatccactgagaaagtgaatcaactccagagacaactggatgaaaccaatgctttactgcgaacagagtctgatactgcagcccggttaaggaaaacccaggcagaaagttcaaaacagattcagcagctggaatctaacaatagagatctacaagataaaaactgcctgctggagactgccaagttaaaacttgaaaaggaatttatcaatcttcagtcagctctagaatctgaaaggagggatcgaacccatggatcagagataattaatgatttacaaggtagaatatgtggcctagaagaagatttaaagaacggcaaaatcttactagcgaaagtagaactggagaagagacaacttcaggagagatttactgatttggaaaaggaaaaaagcaacatggaaatagatatgacataccaactaaaagttatacagcagagcctagaacaagaagaagctgaacataaggccacaaaggcacgactagcagataaaaataagatctatgagtccatcgaagaagccaaatcagaagccatgaaagaaatggagaagaagctcttggaggaaagaactttaaaacagaaagtggagaacctattgctagaagctgagaaaagatgttctctattagactgtgacctcaaacagtcacagcagaaaataaatgagctccttaaacagaaagatgtgctaaatgaggatgttagaaacctgacattaaaaatagagcaagaaactcagaagcgctgccttacacaaaatgacctgaagatgcaaacacaacaggttaacacactaaaaatgtcagaaaagcagttaaagcaagaaaataaccatctcatggaaatgaaaatgaacttggaaaaacaaaatgctgaacttcgaaaagaacgtcaggatgcagatgggcaaatgaaagagctccaggatcagctcgaagcagaacagtatttctcaaccctttataaaacacaagttagggagcttaaagaagaatgtgaagaaaagaccaaacttggtaaagaattgcagcagaagaaacaggaattacaggatgaacgggactctttggctgcccaactggagatcaccttgaccaaagcagattctgagcaactggctcgttcaattgctgaagaacaatattctgatttggaaaaagagaagatcatgaaagagctggagatcaaagagatgatggctagacacaaacaggaacttacggaaaaagatgctacaattgcttctcttgaggaaactaataggacactaactagtgatgttgccaatcttgcaaatgagaaagaagaattaaataacaaattgaaagatgttcaagagcaactgtcaagattgaaagatgaagaaataagcgcagcagctattaaagcacagtttgagaagcagctattaacagaaagaacactcaaaactcaagctgtgaataagttggctgagatcatgaatcgaaaagaacctgtcaagcgtggtaatgacacagatgtgcggagaaaagagaaggagaatagaaagctacatatggagcttaaatctgaacgtgagaaattgacccagcagatgatcaagtatcagaaagaactgaatgaaatgcaggcacaaatagctgaagagagccagattcgaattgaactgcagatgacattggacagtaaagacagtgacattgagcagctgcggtcacaactccaagccttgcatattggtctggatagttccagtataggcagtggaccaggggatgctgaggcagatgatgggtttccagaatcaagattagaaggatggctttcattgcctgtacgaaacaacactaagaaatttggatgggttaaaaagtatgtgattgtaagcagtaagaagattcttttctatgacagtgaacaagataaagaacaatccaatccttacatggttttagatatagacaagttatttcatgtccgaccagttacacagacagatgtgtatagagcagatgctaaagaaattccaaggatattccagattctgtatgccaatgaaggagaaagtaagaaggaacaagaatttccagtggagccagttggagaaaaatctaattatatttgccacaagggacatgagtttattcctactctttatcatttcccaaccaactgtgaggcttgtatgaagcccctgtggcacatgtttaagcctcctcctgctttggagtgccgccgttgccatattaagtgtcataaagatcatatggacaaaaaggaggagattatagcaccttgcaaagtatattatgatatttcaacggcaaagaatctgttattactagcaaattctacagaagagcagcagaagtgggttagtcggttggtgaaaaagatacctaaaaagcccccagctccagacccttttgcccgatcatctcctagaacttcaatgaagatacagcaaaaccagtctattagacggccaagtcgacagcttgccccaaacaaacctagctaactgccttctatgaaagcagtcattattcaaggtgatcgtattcttccagtgaaaacaagactgaaatatgatggcccaaaatttattaaaaagctatattttcctgagagactgatacatacactcatacatatatgtgttccccttttccctgtaatataaattacaaatctgggctcctttgaagcaacaggttgaaccaacaatgattggttgatagactaaggatatatgcaactcttccagacttttccataaagctctctcggcagtcgctcacactacaatgcacacaaggattgagaagagttaaaggctaaagaaaacatcttttctagcttcaacagagaggtttcaccagcacatttaccagaagaatctgggaatggattccactacagtgatattgactgcatctttaagaagtgaccattatactgtgtatatatatataaacacacacacatatatatatatatatagtactctaatactgcaagaaggttttttaaacttcccactttattttttatacacattaatcagatatcattacttgctgcagttgcaactatgcacttgtataaagccataatgttggagtttatatcactcattcctgtgtacctgatggaagttgcatgttcatgtttaagcagttactgtaacaagaagtttaaagttaattatatcagtttcctaatgcttcatgataggcaactttacccattttgaatgccttaatttaatttttttcaaagtctcagccctgtctgtattaaaaaacaaaaaaagcgtttaccagctcttaggatgtaaactagctttgtggaagataaatcgtgcactatttttacacataaatagttatatcaatgtcagcctattttgattaacaaatgtttttaaagtattattggttatagaaacaataatggatggtgttggaactaatatatccttgatgtctgtctattattcattcaactctttttacagacctcagtattagtctgtgactacaaaatattttatttgctttaaatttgctggctaccctagatgtgtttttattcctggtaaagacatttgtgattacattttcacacttaagattcaaaatttttcccaaatataaagaaaactaagacagactgtagatgcattttaaatatttaaatatgatcctcagacatgcagctgtgtgtggcagtattttagtaccgggttaagaaaactggcaactgggaagaagtggcctcaaaggcacttaatttgatttttattttttaaatgctgtcaaagttacagtttacgcaggacattcttgccgtattctcatgatcccagataagtgtgtgttttatactgcaacaatatgcagcaatggtaagcgtaaagttttttttttgtttttgtttttttttatattatgaagtcttttaacagtctctctttatataaatacacagagtttggtatgatatttaaatacatcatctggccaggcatggtggcttacgcctgtaatcctagcactttgggaggccaagacgggcggatcacctgaggtgaggagttcaagaccagcctgcccaacatagtgaaactccgtctctaccaatatacaaaaattagccgggcatgatggtggtggcctgtaatcccagctacttgggaagctgagacaggagaatcgcttgaacccaggagacggtggttgcagtgagcgaagatcgagccactgcactccagcctgggcagctgaacaagactccgtctcaaaaaaaaaaaaaaaaaaaagtcatctaatatttcgatgaaggaaatagacatttttcattgattccctctgatgtcagttagagatatttaaaaagttagatccccataatagatactattgtggaaactgaagagtagctactggcctactgatagactgaaactggttttgttattcttaacgttctccagtctgcactctgctgtgctgtctgtgctcagactagacgtgcatgccgtttcctttgcaggtgtgttctgcagctctggttttgggggatagctcttttttaagtaagattaaaaaatgaaaaatatataaatttatatagaataaatatttccattcattagagttgttaaaaggagactgaattaatattttatataaagattttg

SEQ ID NO: 1529 - protein, 943 aa, Homo sapiens
MKYIQKKLYTLEEHLSNEMQAKEELEQKCKSVNTRLEKTAKELEEEITLRKSVESALRQLEREKALLQHKNAEYQRKADHEADKKRNLENDVNSLKDQLEDLKKRNQNSQISTEKVNQLQRQLDETNALLRTESDTAARLRKTQAESSKQIQQLESNNRDLQDKNCLLETAKLKLEKEFINLQSALESRDRTHGSEIINDLQGRICGLEEDLKNGKILLAKVELEKRQLQERFTDLEKEKSNMEIDMTYQLKVIQQSLEQEEAEHKATKARLADKNKIYESIEEAKSEAMKEMEKKLLEERTLKQKVENLLLEAEKRCSLLDCDLKQSQQKINELLKQKDVLNEDVRNLTLKIEQETQKRCLTQNDLKMQTQQVNTLKMSEKQLKQENNHLMEMKMNLEKQNAELRKERQDADGQMKELQDQLEAEQYFSTLYKTQVRELKEECEEKTKLGKELQQKKQELQDERDSLAAQLEITLTKADSEQLARSIAEEQYSDLEKEKIMKELEIKEMMARHKQELTEKDATIASLEETNRTLTSDVANLANEKEELNNKLKDVQEQLSRLKDEEISAAAIKAQFEKQLLTERTLKTQAVNKLAEIMNRKEPVKRGNDTDVRRKEKENRKLHMELKSEKLTQQMIKYQKELNEMQAQIAEESQIRIELQMTLDSKDSDIEQLRSQLQALHIGLDSSSIGSGPGDAEADDGFPESRLEGWLSLPVRNNTKKFGWVKKYVIVSSKKILFYDSEQDKEQSNPYMVLDIDKLFHVRPVTQTDVYRADAKEIPRIFQILYANEGESKKEQEFPVEPVGEKSNYICHKGHEFIPTLYHFPTNCEACMKPLWHMFKPPPALECRRCHIKCHKDHMDKKEEIIAPCKVYYDISTAKNLLLLANSTEEQQKWVSRLVKKIPKKPPAPDPFARSSPRTSMKIQQNQSIRRPSRQLAPNKPS

SEQ ID NO: 1530 - DNA, 66071 bp, Mus musculus
  misc_feature (1)...(66071): n = A,T,C or G
ttcatccttcttttcccccacaacccgaccccaccctgtgaactcagtgtgtatctctcagagcaggtaggccagttccttgtccatagacatggttcagttagtagtgctgaactgctctggagaaggtgtttgaaatgtcttcctgatttttatctcttttggctagttctcctttgagtgtatttcccctgatctttgggattttgtatgtgagctgagtggccagaaactaagtctatagtgtctgatgtctcatgctgatcaagaaatgctattctctgagagcctggcattttgccacatctgtggagacaggagaatcaccagttcatggccagcctcatctccataggaaatccctggccagccttggctacaagagactgtttccataaaattaacttcttaatactatcttccataatcattccatttaacaaccctctgcccgcccacccagagctgaaatgaattggatgtctctagagggcatctgtacgggtacacggtcctgtggtagctggggtgctgagaggcggaatcccagagtctgtcatcgccgtgttctcatgtttacatcttctgtcgctggctgttttttcaaacatgtttttcttccccactgtgaaacaaagccaattcagagtagctagagtgtcctcaaccgttcctgccaacaactgaatcttcaagacgcagttcctaagtcagcatgccggaggtagaggcaggaaaagttcaaagccagcacttggcgacctagaaagttctaggccagcctgcactaaggaacctgtctcaaaagaaaccaaactaaagtgggagggggaaagacaaaaccaaactaaacaacaaagccttgcttctaagtcagtgaatgaaaatgcttgtttaatggtcagaaacctcactcatttgcatgccccctgtctccaattaccccaagaggatatgtcctttgagcatcagcctgtcacttctgtggcaagaaaataggaattagaggaagccaattcggaaacctcaaagaagaggaagtgtctccaggctgaagggaaggcttcggagtcttacttcctctctgttctcgatcctccgggtggtcccccccacccacacaccccagacaggaaacaaggtctgggatgaacaagggaaagtctaaaagactccaaggtgcaaggacgcaccacagctgcgacagtcacaataactgattgatgtttgcagttccacaacgctgcccattcatgggtgcagccggactgtatgggacaggatgggtaagaagtagccactgtcccttctgagtacctccaagcgcactcaggtctgtgcagttcttggcttcgcagtttcctgggactagagctttctgaggcttgtttgcccacaccccttccaagcagagaagctgagttcaaatctagaaataacttgttttattttcgttgtagcaactaatttgatttctactttgcctttaaagtagagtcaggatgctcctgtttgagagaagagaccacaggcgtggtcagtgggtggtaagcctgtggctaggctcagattcaaacactgtttctgagccttgcgctcagagcccacgacgttgtctctcttttccctggattgctttttacagaaccgttcactgttctctggagctctggaaagcttcccgtgttagcctgagggaaagcagtgtgccacaaaccaccaatggctaagactaaaccaggtgtgctctcccagcgtctgggcagattaatgagacttctcaaggaatttgcaatctctctctggcttccagaaacttcagctgagcactgggtcttcagttaaggcagtctggaaaaacaagagaaacatcacaagtctaagatggttacagtgaagttatggctaaaaaccaagggtgagctgcagaactgcaggtcttggctgtgaagaaggagtcggtgaacggttatagttaaatgcccatgtgattgaaccaatacaattccctttcaaatcaaagaacagcatttatcattgttggtaattgctgagagaacccaggtatggaattatattgactggtaaggaaggagatggcacagaagagaaataacaatacatgtgtctgctctgttgatagacacagcattagagtcagaaagccacactgcataccatggacaaggggaatcgaggagcactgctgtagctttagtgttttcaatggctacttttactgatggttcttaaatgctttaacctcccttctagcccaccacccaccagaggtagtggggaaaaaaagattattgggatatggggaagtggacctgtttaggaatggttctttgaagcaaatcccatctgcattgtcaagaaatcagctgttcaattcccaggtcagcagtggcagcttgatccactcgcaaacacttcacggatataccagcagtccagctcagtggtagcagcagcgggtggcaccacctagcaggaacaggtagacctcagccaaattggcacgagtcagcaggagggaacaggaccaacaggaataccaggagcagttctttgctgtgcctctctcaatgaagccaagatcagtgaagatgcaagaccaaagagtgttgcagagccagctctaccagcaagcccctctcacagtccattcagtcccatttatccaccctccaaacatcacgtgacctccatgagtcctgcctcaccacatgccttgcccaagcacatgagtcctgtatcagctgacatcattctgccaatcagccatagtccaaggaagccgcaaaaaaggcgccagcgcatcaccagaagattttttggcacatttctccctatggagtcccaacaaacgcagctcaactaggaaatgtagggtggaccaatacataccatgtcggtagcaaagactccttcatcacgtgtcctttcgcgtgcttgcgttagcagaatatcctttcacctgtgtttgcttcaggaaaacactccttctcatttgctccaccaaaacaccgtccaacacaactgactttccaaagaccccttaagtttcccacttcacactgctctattagaatcctgtcaggtaggagtgtgaaggttttaagagtaaaactataatgaagttgaagctagagagatggctctactgttaagaacactagccattcttccaggggtcctgcctgggtttgattcccaacacccacatggcagttcatgaccctcttgtgactcctgtcccaggggacccaatgactttttgtgacttccttgaacactgtatgtacctagtgcacaagcatacatgctgacaaaacattaatacacatgattttgtcataaagtatgaagttaacatgtttcagaaaccacatcccagcccacatctgatgtctcatttgtccctctcctttgttcatagattatgggactagagtacagataaactgccttttctccttcacagtacttatcaggattactagactgctagctattcaaacacagctgctgagctgcaagatctgctggacagacttgagccagggaaagagatgggttgggttttgttttgttttgttttgttttaatgagaagactcagagtcttgtcaggcaatcaactggggagacctggttggtgaaagtctggctctctctctctctctctctctctctctctctcttttctctggtagggttgtcacatcctgagatcctacttgaaactgcctgtaagggctctttcacatcaaggaattccaattctcccaagattctctactgtagtatattcaaattcagaaggccttgtgttttcacacccacgaatatcacacggaaccacagacctcatttttttctctattcacagcctcagtgaaactacccggagagcattttaagttatggactttttgtttatgggggtaggcgaggatggggtgggtgtgggtggcaggaacagtttgggggcttacacatcatagacaaatcagtcttcgccaagctatgtcccccataagagcagaattcttactgtgcctttgaacaccacgtgattcggcatatcactgggaaagccacaccgccaccttgtaccttggcctttgtgggtaacccctaccttccaccttctcctatccccggggagtgtgggctttgctaaacagaggccctgctgaaaattttccaagactcacgagatgtcaagtcatttctaaaaattttcaaaaacccagaaagtcatttcaaaaagtctgatttggtggctctgtagagaggaagagcaaactttccatcgaggcagcaggtctgccccataggcttgtgctaaagctgcaggaatctagacttcagtggcagctcctgagccaggggaagtccacttggctgagtgggttagctgctgcccagggcacacatcatgaagcctgcttccaggggatttcccttggcaatgggaccagcaaagtttcatctttctgaaagatttcccagaggaatacaattgactatatggaaaaaaatctcaaatgtggatttctcatttagtcactagtctcttcaaataaggaaaaataaacacaattagctcaagtagtaagaatgtatattctctgaatgagctaatgcttacttcatcccaggccctctgctttatgacactgagtcaagcatgtggctccggcccagtctaagccggattcgaatcccagctttcagcatcagaactgaaaactaaaccgattggttcaaggaagtatactaaaaaaatgctaaaatataccatcccaaatcatatatgcttctttcccatcctccttaaatgtagtctcccaactgcgtttatatcaagatatcaagatttgtttgaatctgtgaactctcatggcctgtagtgtgtgtgacttgcagcatcccaccattacaaggtaatgagaatcttgtcatggtgacatgagaatcaaagagttaatggctgtgcaaacatttctctgttgtcacctttctcgctacagttttcaatttagtgttaggagtcatttattgactatcatgagcaactgttgttccaagtgtggaagaggctagagagagatccgggctctgctctgctaaactggcgaagcccagacatccaagcgtttcagtgaaaccactcagctgccagtgtgtccaagctcacaggtgacctgcttggactggaggcgtagttcagcctagcatattgtgagactccaggttcaatcctcggcaccgctgaaaataaataaataggctctactagaagcagtgcatagataacgaacgtgtccataggccaagtagatcccttgtttgatcgtgcaatggctgaaattgagaaaatggggtggtggtatcaactggttccaaggatgtcaaggatccaagatctcaacaattgccacgcacacaaaacccgtgctgataactgctaagtacagagagttagctcagcacgaatggctcgactgatggtgatcctggatgaagagcccctggagttcctgtcttgtacatttctgaccacaggtccatcaccaagcagacagcagatgattttggagctgcttggttctaattcttccaaaacaaagttcctctgctttccttccaccaatgctgttagcagtccagcatccagagcatgaattattctagccacccattgtctttattgtgagccaaataaggtcaaatacactcccttttatgctttctaaaataaattctcttgagaattcaagtcaataaaaaaaataatggattttttatacagtggccatgaaaagtacagaggcaaactggtagagtagggcttcaataaacagacatgggcacaggtggtcctcacagtaaaggggagcttgaagagtaaccgggcaatggaggctgaagcagaagagaccagcttgttaacagccctgatccccacctacatgttagtctttcttcagcagatggtgagggcccaaagggaaccaggcagagaagtaactgagatgttgctctaaaaaaaattgatactgggaactgactgatcaacaagaaactattgttccaggtagaccaagaggactgaatctgaacagtagagaaagaataaaagccaggggagtcatgtcatggggataatcagcagcatgaaataccaacatgggaagcaccatgacgcacagtcctcctctgctaagggctcgttagatgctggggctttgcttagtatttctcttatttaatctttagagaatccagcttgtattagatcagatatctgggaactattgtaagtggagtttaaattcaactttaaatagaatactctttttttaaaaatgtgtatatttacatgaatataccatgtgcgtgggggtgccctcggagaccctataccctggagctgtagttacaggtggttgcgagttgcctgacatgtgtgctgtgtatggaactaccaggtcctctggaagagcaagtgctctttttttttttttaaatatttatttatttattatatgtgaacacactgtagctgtcttcagacacaccagaagagggcatcagatcacattacagatggttgtgagccaccatgtggtttctgggatgtgaactcaggaccttcggaagagcagtcagtgctcttaaccgcggagccatctctccagcctgagcaagtgctcttagccactgagcactagatccaagggatttattcttttctttctttctttctttctttctttctttctttttttttttttttttttgacagtctcaagtttttattcagtgggtctctgtgtctagaagaaggtgttgggcctcttggtggtgaagcgtggcttgtgctggcgcagcaacacgcggtgaggcagtgggaatttgatcttggagtagtggaactgcttgacagctggcgggcgctacttgccagctgcaatctcttccaccttcatgatctggatggagtgggcacgggcacggtgtcgggcacccatgtctcggtagcactgtgtgactgcaccagcagtggtcaggtcccggtactcccggtacatgttgtgtgtgccactgcgggagtcatagcgcagccagatgccaaagttcttcacgcgcaggggtgacttctcaaacacctgtccgcagtacacaatctcccctgatgacttcttcatcttcttcagctgtgacacaaagtacaagaagcgggacttggccaccacatggttgggcgcaaagattcgcatacggtacagtggtggtgtatggcattttggggttggcaagcagcgccccaccaccttgtactcccgaagtgtgcccgaagccttcatggcactgcgtgctcgttcaccgccagtcacaaaaggcggatttagtcttaatttatgtgctccaaaggattaacatgctcattcagcaagtatttatttatttatttatttatttatttatttatttaggtttttcgagacagggtttctctgtgtagtcctggctgtcctggaactcactttgaagaccaggctggcctcgaactcagaaatccacctgcctctgcctcccgagtgctgggattaaaggcatgcgccaccacgcccagctatatttattgttttatatatgctaggtattgtccccgttaagctgtatctgtgagcaatgttgtggaattctgtcttcttggcacttagagtaagaatggagggatggcaagaagtaaaggttttgttctggctttctgggtgtgagcagcccggaacatcaaagactgtggagaaccagacagtgtgggaaggtctgcacaggagccagcaggagcgccacaggtttctggaacagcagagctgcagatgagcctgaagcatgtcagaaccaatgcttctcaggcatcatcagcctaagtccaccccctgccccaggttctctgtgggcatcaggatggggccaaggctgtggtcatctctcacgaggacagtgaggtactgcagaagcttagcatgagcaagaaacaggacaagttgcccaagatatgtgatgcctttttggcctccaagtctctgatcaagtaggtcccgataccctgggtccaggcctaattaaggctggcaagttcccttccttgctggcacacagtgaaaataccgggccatattgacgaagtgaagtccacaatcaagatgaagaaggtgctgtgtctattgttgctattgcttgaggatgaggaatgagaggtcttacaacacccactgggttgtctctttcttagtaccattactcaagatctggtaaacatccaggtcttatacaccaagagccctgtgcctgcgttagagcacatcctaccataaggtgaataaaactaagaattatataaggagccaactaagacatcaggagcagagagaggaaatgctgaagatttgactgctacaaggtgtgggctctaaatacaaagagcaggaactggaaggaaagagatgaggaatcctggttttgcctattttgggtaatgaaatgtctgtttattctgatggaggcaactagggaaaattcagcttcaatggacagtgcagtgcagccctagatatgagacatctggattctaaggtactaacagagggcttcccctagcagtcttacagagaacttctccgtgactgttcaggcaaactgtaggtgttatagtacacttggctgggaagactgagaaaagtacgcaaaggtcaggagttaatcctgatgtaaggacctgagctagaaccaagggacagcagctcttatcagcacacttgggaattgaagctggaaagtaccgggtgttccagagcggctgcttacatgggctattttcttaacccgtgtttcaatcttggatgttgtacaccctacccccacccccagacagccttctttttcctgtgtagccttactgtgtcctgaaactcattctgtagatctggctagccttgaacccagagatgtctctgccttccaagtgctgggataaaagatgtgtcccaccacacctggcttatatttttttctaaaggaagaaaaaaattagctcgagaaattaaaacttccttatgaagaatctcttcaaatgttttgctttaaaatgggtgcttttagagagaacgccacagatctgaatatttcagtattacatcagtaaattgttataaatattgctgtaaacaaaacttttatttagggaggggggaatagcttaataatatgcttcgatttttatattcactaaataggggctgtgccctagggtgcacaatgtgcagaattttacagtttgaaaaaccaccagttttccaggagttgcttcgccgccttggaattactctccggtatccagccaccagcaacgatcttgctcatcatcaactaagactgctcaacctctcaagttcccatctctgggccgctgtccaaaggaaagtcttgccagactagaagaaaacttttgttatttccagtggcttcttccactaaccctctttcaggccctacatttaagggtggctgttgcattcctttctcccccaaaacgtaggaagagaagtggctggtaaaatgaaggttaggaagaacaaagccagactccgggaagacaggagagcaagtacaggcgcccaaactgactgcgaacgcggtgaccatactgtctccagaggtcacaagtaggcaaaggacaactgcaggcaccttgaaaacttcctcttttggccactctgatctccagaacgcactaacggccggctgcgacccagagccaccacccggaagcccgcggaccgcaggccgggcgcgcgagggcccgcctactcaggggcagtgctttgggacgtcccgtccccaccggaaacaccgccagtccctcaccagagcggaagcagctccgccggtgctccggaagcagtagccataacttccgggagggggcttgggtccctggtgtgtgtgctacggggtgcagactgtgtttaaaatagcaggaacgccatgtcccggggttccagcgccggttttgaccgtcacattactatcttctctcccgagggccgactctaccaagtaggtgagtgactcagggcctcctgcgggacctccgaattgctctgtcatgcttcggcctggagcgagcggacgcggcccgaggatggttcgggggctcggagaagggcctgagccaggaaagcagcaggatcgaggtcgggcccgctctcgtcttcccagcccggtctgcaagcgggcttggaggctgaaaccgaagcgtagtgctcttcaggagcgccttactggccagacacaaagcagtagggctttgcactgtgatgcccgccttctgcctttcggagtcccccgtagctcagcgattctcaatcttcctaatgctgcgccccttaaatccagttcctcgcgttgtgatgaccctcagccataaatttgttttcgttgctacttcaaaactatgttttttttgtttttttgtttttttacttcaatgaacggtaatgttttttcagatggtcttaggcgaccttgtgagaaggttttggtactgggggtcgcgacccacatgttgagaagcactgtttagcatcagtctacctggagcctgagtcttcccttcgctgagagtggttggttctttaaccatccaacttaaatgcacacacaccacacaccctcaaccctcctctgcagtatagatagatgacttgctttgtggtcaactctatacaagtgtgtaaagccctaccagacactgctggttctagaaaagagatcaatgtcactcgtccctactgaagctgactgcttaaaggaagtgacaggaaaccaaacgaataaaaagagaagagttcagtatatgcaaagttcacaactgagaaataaaagaacagcaatgaactcctcttgaagttggcaccccgattttaacccccacctgtaagaatgcttctatagtttaaaaactggttctcagtctagttgaggcacggtgtgttagtctttactaaaggaacagctttaatggacggaaacctgaacttagcatcagttactccatgtaacaatacattttggtaagttgaagtcgcggcagggtttggtctaggattataggacagacttttaagctcttgccatagaaaacttagtgtcagaagggcgagacatacatctggtccatgataattttattttgaagttttttatctcagtgtcttgacaaggagagtcatactatcttggttggaaatcctagagttggcctataaatggagttctactcacctatatgcttagattattgtttgagttgttgctttccctcttttactcagggcatgaggtaggcgttgctgagaaaaaaactgaaagagcagtgtgagcaaggaggagagtgtgcagaggtcaggccttgcaggcacacctggactaccatgcctgctgtgcctgctgtgctccatactagctggcctgccaccatagaatctttgctcaatttctgtttgcaaaattgggctaataattccttctattgtgttttgaagatttaaattaagcagtacatatattgcttattgtgtgctattatatattgagtacttggtataacaggatgcctgtttgaaactttgacttaaaaaataatctattcaattagtccctctgtagatacagaatccctttctttgggtccatccttcttagtttgctagtgaagtatattcacaatattgtaattgctgtgcattagactaaactttaggtctcccaaagatccagaatctaagaactataaaaatgcaaactgttaacctagatagctgtggaataatataacaaactggggtggtgataggggaagtaagaattaataggatgttcctcctttgccatactttaaacatttaattcccaacaccaaaataaatagtctagcagtgatcaaggaataaatttaaattatactactaaacatagttataaacatgatctgtaattttaacagtaccagttggtagacttttaaggaaataacactttgataactattgacttttttttggtttggttggttttttgcttttcttttagaccttaaaataataatttaaaaaaattacattaatctattttgtgtatacagaagtcagttctctcctcccatgtagatcctgggaatcaactcagtgtggtgtgtgtgtgtgtgtgtgtgtgtgtgtgtgtgtgtgtggctgctcgcctgcctgcctgcctgtctgtttgaattcaggttctctgccagagtaatacactcttaatccttgagccatctctctagcctctgaaattttttttcttaattaatgtgtgtttgtaggttgtgtttgtgtataagcatgtgctaggaattgcagaacatgtaagttaataattcagtttttaaaaaattatattgtatttgttgtctgtgtatgtgtttgtgtcttcatgtgcatatgtgtatatatgtatatgcccatcaaagggcaacttgggagagctgcttctctccactgtgtgggtcttaggattgtcctgtcaggcagtgggtgcctttaatctatgagcatctctctggccataaagttcttccttaatgtgtgtatacaaattgcatttgtataggtgtggttaagaattaatagagcaagccgggcgtggtggcacatgcctttaatcccagcactcgggaggcagaggcaggaggatttctgagtttgaggacagcctggtctacagagtgagttccaggacagcctgggctacacagagaaaccctgtctcaaaccctgccctcctccccaaacaaaagagcacattagtttaaagtttaattttaaggtttgggttgcagcttggtgtttatagcacctaagaagatggggtggggtacagaggaagagggaggagactgttaattatatgtatctacacacatacatgtctacaccaaaaacttaacaggctcaacactgttataagtctcatattctctcctgtgccagttccaagattgctaatgaccccacttttgaagatacctgttttagaaaacaaatattcgggagttatgtaaaatgattttgtagccttcaaatttagggaaacagcagaatatctcatgatttttgctggtttttgtttgtttgtttttgttttttgattttgtttttctgagacagggtttctctgtgtagcactgcctggctgtcctggaactcactctgtagaccaggctggcctcaacctcagaaatccacctgcctctgcctcccaagtgctgggattaaaggcgcgagtcaccaccgcccggtgatttttgctgttttttaaaggtttatttttaattatatgtacgtgtgtgtaggtctgcacgggggtatatgcactttagtacaactgtctgcagcggccaggaacattggattcctctggaactgaagactgagttgagtgttgagctgcctgatgtagttcatgggaactgaacttgaatcctctgcaagagcagtaaatactgttaactgccgagccatctctccagctcctcatctcttttctttcctctttcccttcttgtctcttcttttctggctttgtttgtttggggttttttgttgttttgtatgtggtttttctagacatggtttctctataacagccctagctatcctggaactcactttgtagaccaaatcagcatcttttgggttttttgttgttttgtatgtggtttttctagacatggtttctctataacagccctagctatcctggaactcactttgtagaccaaatcagcatcttttgggttttttgttgttttgttttttgtttttaaataatcaaactttataggctatttggatttttcattttaacttttcaactaatgtttatctagaaataagaaattatatttatatgcccaaattcaatatggcattttaaacaaaagtgtgagtgggaagtgttaaattgtgttgctacttactagccccccagagtcacttgtacaggctttataatgtgtgtccaaaagaggagggggtgctgcctgctgctgacactgagccattcattccctggtactgtttgcttgtcctgagcttttgacgtagtagacatagtaccttctatagttagcctgcttccaccctaatgtttcagaaatgaaaagttgaagaaatggtaggaaatttaagatttggtttttgtgtgctggtggtggtgcatgcctttaatctcagctcttggaaagcagaggcaggtggatctctcaaggtcagcctggactacagagtgagttccaggacagccaaggctagacagaaccagtctcaaaataccaaccaaacaaaagatttgtttttattttatatatatgagtatttacatgaatgtgttcatgtgttccgtgtgcttctgggtgcctgtagatgtcagagaagtgcaggaattccttgggactggagctcaggtgttgtgagaagccatgtaggtgctgggaatcaagcccagatcctccaaaagagcagctaagtgctcaaaaccactgcgccatctttctgtcccagcaatttccatcataacagcttgtttttttattgaacataaaaactactgtgtttggctgtttttggttttgtgtgatgtgtgtacagagtgtatgtggtggattcacactccaacggtagaagacatcagatatctttctctttcaatttctaccctattcctttgagacaggagctctcactgaacctagaagtaggttggctaccaacaatctccagtgacctgtccgtaatctgccacttacacatgcgtgctcagggatcacaagcatgtggccatgcctggcttcctatgtgagtgctgggttatttgagttcaggttctcatacttcgacagcaaacaatctttcctgctgagccatcttcctagcccaggttttgatttccaatttggagagggattgtgtggaggtcagagaaaaatcgcaggagttacttctctcctaccgtgtgggatttggggatcaaactcactgtcatcaggcttgagcccaagtttatctgctgagccaccgtgaggggcttagtgattgattgttttgagacagttttgttgtatctgagactggctttgaactcgaggcagtcctcttgccttagcctcccagggctgaggttataggcatgtcactacacgtgaccattttttaatatatagaaagtgacagttttaagggctgggtatcaagaaacaaagtaagtagggtcaggtgtattgatctgccagacagatctccatgatttcaagactagctagagctacatggactctgcctccaaaataaaagacctatgtaaaaaaaccacacgtggtaggtggtgtgtgtttataatctttgtagtcccagttctggggtggcagatctctaggacttgcaggctagccagcctacaataccttgaagctctaggccaatgagagacctctatttcaaacaacaagatagacagccctgaggagtgaatggcacttgtttgttctctggctgggtatacacacatgtacacatacacaaaattcacttggatctttactctttttcttttcttttttgaagaatgttattattttatttgtgggtttttttttgtttttgttttttttccgagacagggtttctctgtgtagccctggctgtcctggaactcactttgtagaccaggctggcctcgaactcggaaatccgcctgcctctgcctcccaagtgctgggattaaaggcgtgtgccaccactgcccggcatgttattattttaattatctgtatgtgtctgagtatgtgcatatgagtgtaggtgcccacagtgtacagaagagggcaatagagctggggctggagttgagggaagctgtaagcatcttgatatgtgtgctggaaccgaacttgggtcctctggaagagcagtaagctctcttaattgctgagccatctctcttagcacctatttatttatttaatcacttccagtctgcactaaagttcacttgataaaagtttctggatcattgttttattgtttgaaacacagtcttgttatttattgtagaccaggatatccttgaacacctgggccttctacctcaaccttagtactagaattacaggccaaggctattggtgactttttgtagtttagatgctgtggttttcagttctataatttccattattattattattactactacaactactactactacttctttgtgagtatttgtgctacaatgcaccgggttgagaggacagctctgtggagttggttctttccttctgcattctgatatcagttctggggattgaactcaagtcagtaggtaccctagctaggtttccattgctttggcaaaccactatgaccagaaacaacttggggagggaaaagtctatatggttttcatttcatgatcacagtgcatcactgtgagaagtcagtgtaggatctcaaacaaggaacctggactcagggactgaaacagaagccatggaggaacattgaatgcatgtgtttcttatcctggtcatttataaagcctctggctagtccttagaaccagtgtccagagtatcacttaaagttaagttttgagattgtctactatgtagaaaaatttaggtcataattggaattataagtaattttaagaaaaaatttctgagctggctgatggtggcacataccttaatcccagcactttggaggcagaggaaagcagatatctgtgaattctaggctagcttgatctgtagaactagtgccaggacaaccagagctacacagagaaaccctgtttcaaaaaaggaaaacaaaaattatcttctgtattaacacagaaaatgatagccatatttctgatctcatctcatcaaagatggtccttactaagtaaactgtgggataccagagtagtttgtatttgctcccatcttgacaccagtctttcaaaccagagagtgcattgagagtaagtagttacaagtacacattctgaagtttgtaataaactgaaaagccctatgttaattgtaagttacaaaaattgcaacattttctttccattcttgagataagatctcatcatgtaaccctggctggccaggaccatgctaggattaaacgtcaactggtagacaatattaatatgaaatctaataccaaatattaaaactgcatgtagtaagttattgaccaaaaatcagcagaagcactaaatctttagagcaccagttttgacctagggaaagcaggcgtgatgacactgtgcccatagaacagctttgaaaatgataagacatattaagatctgctgtgataaacttagagtagaattcatttcaaaatttggcacttgaacctaatgaaaattcagtaaaataaaactggaagaaatgaagctggttacactggttgattgacatttttattattttgactttacttctcttggttggcattctacattcctatagcttaacctgattcttttaatgatggtttattagtttccatgtaagagctatgataaaaatacagaagtggatgttcacagtcatctattggatggaacacagggcccccaatggaggagctagagaaagtacccaaggagctatagtacccaaccctataggtggaacaacaatatgaactaaccaaccacccctccagctcgtttctctagctgcatatgaatcagaagatggcctagtcggccatcattggaaagagaggcccattggtcttacaaactttatatgccttagtacaggggaacgccagggccaagaagtgggagtgggtgggtaggggagtggggggggtagggtatgggggacttttgggatagtattggaaatgtaaatgaaaaaaatacctaataaataaaaaaaatttatttaagaaaaaaaaattatcccaccttagccagacatgctttttaatcccagcactcaggaggtccaggccagccagagctacataatgagatcctggctcaaaaatggaaagaaaatgttcctattttttttaaagacagggtctcttgtatctcaggctggcctcaaactctctgtacaaagatgaccttgaattctgactctcctatctgcccaccaaatgctaacattgtagtcaccaaactcagattgatccagtattttgtgcttactaaaccaacacttttttcttttggtgtttcgagacagggtttctctgtatagccctgactgtcctggaactccctttgtaggccaggctggccttgaactcagaaatctgcctgtctctgcctcccaagcgctgggattaaaggcatgcgccaccacgcctggcttaaaccaacactcttatcaactgagcaacatccccaggtcctagtccaccttttaaaaaacaaacaaacaaacaaacaaacaaacaaaaacctgttttgtttttccagaatatgcttttaaggctattaaccagggtggacttacatctgttgctgtcagaggaaaggactgtgcagttattgtcacacagaagaaagtacccgtaagtaatactgcccagccagtcaatggctgcaaaatcaaatgtaggaattttctgtgatttttgaacagggttatattaccaatttacattaacatttgtcttggtctgactctgcctttttactaatcactcaaggaaccctgagcagctggacccttttaggctgagattgtcacaataagtcacaataagtgggatgagatttctaagtcctttgttttctgggatctttaatccacagaaaacatctagaaaaaacatcttcctctaccccttttgaaagattggttttaactgtaaaatgaacagaacacacatagctcataactcctattttacagtttattgctccagttccacactggtggttttttataagtgtgcagaggctgtggactttaaaatgacatggcggtggtttattttgttctttaggacaaactactggattccagcacagtgactcacttgttcaagataacggaaagcattggctgtgtgatgacaggaatgacaggtaaccgcaagcagcgccgtcctggagtgcagcctggcagtccttcctgccagatcactttgtatttgtgttgtgtatttgtttttgcatgtattgatggtgtatgtgggaggggtgcactttgtcagggcatgtgtgggtcagcaacctgtggaagttggctttctctaccatgtgagttctaagaatgggactcaggttgtcagacttaaaagatacccttacttgccagccctgtcttttctgctttaaagatcccttagtgcctggttttggggtgttactagtagattcgctattttcctatcgtccaagggtagtattagtttgtgtttgtacaagtatgctcactgtgcttgtggaggccagaggttgacttctgatgtcttctactatcaccttcctccttattttttgagataacttctctctcctatgtgtatctctgttgcaactagactgtctgaatagcaagcctccagggtcatcttctgtttccaaggtacacacacacacacacacacacacacacacacacacacacacacatcccagggttacaggtcccgggttacaggtgtatgcctggcttttacatggctactagggatccaagcttaggttcttatgtttgcacaggtctttacctgctaagctctgtgtccaccccctaataagatatttaagatggtcatgaatttggttggttggtcacttagtggtttagttgcctgattatagttattagttgacttactggctttttggtttggggtttgcttgtttgaggtagggtctagaactccactgtgtagagcaggctggtttcctagagatctgtctggctctatctcctgaatgctgggattaaagatgtttgcaaccatgtctggctgattggctgtgttttttagacaacatcttgcagtatatatagttctgctggcttcagattcaataattatcctgcctcagcctactgagtgctgggattacagaagtggactaaccatttctgccttgtgaactattttgaaatcataagtataatatagttgtaggtctttatgttgctagtggggaatctggaccccttatagatacggtttttatttcagatgtggttagttagaagtgagtgagagtttctacagaatttattttggctttcaattttctaaattcaaaggaaaattcatgtctaaaacataaagatgaagagattattctctctccttaaagtgtgttatttaggaggctagagagatggttcaggaattaatatcccttgctgctgccagaggacccaagttcaatgccagcacccacatagcagctcatgatctccttgtctatgatctccactggcttcaggggcacttggcacacatatgatacacataaaattaaagtaaaattttaaaaatagcatttctcataaaactttttttttaagtatattctttgagttattagacttttttccccctctgtgtagccttggctgcctggaactctcttggttgaccaggttgacattgaactcagagatccaactgcctctacctccaaagtgctggggttaaaggcatgtgccactagctcttggccattattaaactaaacttttttattattatatttatttgtgcacataatgtgacatgaagcatgtttagacatcagaggacaacttatgggagtagtttctctccttccatactgggtcctggggatcaatctcaaagccatcgggtttcatcctgccagccctggttactagattcttgtagaaactgtttttactgctggtgaaagagcaatatgttatacattttagtgaaatgttttaatatctttctgttcttacgtatactccatgccaagtcactcagtgtttattatcacaagaaaaagccacagagaacccttgtttttctgtaacatgtatttgaaaaatgtaggtatctgcggtggagaaataggctttcaggttcattctgtttctaaagtggtaactctgggttttgtttatccttgaagctgacagcagatcccaggtacagagggcacgctatgaggcagctaattggaaatacaagtatggctatgaaattcctgtggacatgctgtgcaaaagaattgctgatatttctcaagtctacacacagaacgctgaaatgaggccactcggttgttgtaagtatgcttagacttagtcttctaaggaatcgagttgtgattgtctatagagagcatgtataaagaaactgcggccacacttggattctgaatatgtagtttgaaattacagcttcgagttctgttttttttttttttttttaatcaaagtatttctgtttaggctatgtgatctgaaagtcctattttattaggctgttgtaatggggtcctgctataatttcaggttattaattcattttaaaggtatcaatgccatttttgatcaatgggaaagttgggctaatatataaatttatggtctctctctcttctctctctctctctctctctctctctctcacttacacacacgcacacatacacacacacacacacacacacacacacacacacacacacacacacacacaaaacagggtttctctgtgtagccctagctactctctttgtagaaccccagtcctctggaagaacaaccagttttctttaagtactgagccacctctccagtgtctgatttcatgctcatccccccttaatttactcaagcttccctcaggtttgtgaccccctagcctcaggctcccaggtgctagcttacaggtatgctgacacccagtgctctcttctgctcagtttcttttttttttttttctttttttttttccttttccattttttattaggtatttagctcatttatatttctaatgctataccaaaagtccccccccccttttttttaaagggaatatacatcgatgaattcaacattaaagcaaagcaaagctgttgttcagagagattcttatttttttttttaaagatttattttattaatatatgtaagtacactgtagctgtcttcagacactccagaagagggagtcagatcttgttgtggatggttgtgagccaccatgtggttgctgggatttgaactttggaccttcggaagagcagtcgggtgctcttacccactgagccatctcaccagccccttctgctcagtttcttttgttccttctcctccattggccccttaaatgttgtcacttgccggacgtggtggtgcatgcctttaatcccagcactcgggaggcagaggcaggctgatttctgagttcaaggtctggtctacagagtgagttccaggacagccacacagagaaaccctgtctagaaaaaccaaaaaaaaaaaaaaaaagtcacttatcatgcttttttcttgggtctttgcttcctctttgccatctggttaatgtcatcccttgagggcatcacttcctaccttacttacctgctagtcattcacctaaaccaggtgaatgacttagccattcctcccatttctcagacacctttgagtcatttctgatctacatacatcctcagcatcttctttatagtcttagtccactctccctagtcatctaattaagccatggagtatctattccctctctcctatcatttctcattatcttgttgctattacttcctatctaatttctttctttcttctgtcccttctctttctaatctgtcctctgtattccaaaattattctaaaaatgaattttgattgctacagcaaagaaaggggtctgaggagacgggatggcatggactttggtctttttgactacacctcttaacaagttcagtaaaaagtgaacccatttaaaataacagcaacctgatagatcctttttcaaaacagaaatgtacctgttacctaatttgtcacgggtaataaaactacattttaacggtttgggggaaacaagcctaaaattagtgaccaaatatgattaacagcaactatatgaaaacaccaagaaagggagatttttgtaggacagtttaacacatctaactggaccctttctttttaggtatgattttaatcggtatcgatgaagagcaaggccctcaagtgtacaagtgtgatcctgcaggttactactgtggctttaaagccacggcggcaggagttaaacaaacagagtcaaccagcttccttgaaaagaaagtgaagaagaaatttgattggacatttgaacagacagtggaagtaagttagccggaaggaaggtgtgaaccttgtctcactgctctgagagagtgagcatcattgtgttattgataggctatgaaagctgtttcttaatgatgtcacaagattcagtcttgttagtttaatgttagaattgataccattcagctcacatggggggaaatgggggctcttttaatcattttatttctattttcataatgcatatgagacttcaacagacacaagataggaaaataagactcgactcaaagaactcgctctgtagaccaggctggcctcgaactcagaaattcgcctgcctctgtctcccaagtgctgggattaaaggcgtgcgccaccatgctcggctgatttttttttttttttttaaattaggtattttcctcatttacatttccaatgctatcccaaaagtcccccataccccccccacaactccccttacccacccactcccactttttggccctggcattcccctgtactggggcatataaagtttgcaagtccaatgggcctctctttgcagtgatggccgactaggccatcttttgatacatatgcagctagagtcaagagctccggggtactggttagttcataatgttgttccacctatagggttgcagatccctttagctacttgggtactttctctagggttactatgattaatagactcaaagtgggttaaactttttggataacaaaagtaaacccactaagattcggtaatattgttttattaacatttatttctgtgtgtctgcatctgcagacactcataggagtcaggaccaatttgccggtggcagttcttagttctaccatagggcttccgagattgaacctacttagctttggcaggaagcacctttacccactgagctgtcttgctgatccagtaattattttcatggtcctaaataaaagcagctacaagctaagttcttggagagcaaattgtttcctagttataaaacattatgtgaacagaggagctggaaagagctcagttaagtacttatctcctgagctcagggatctcgggtcagaccccagaatctacattgcaaacaaataaaacctacttattatgacacatgcttgatcattgcattgctggccagcccagccacgcttgttcaggccaatgagaaaccctgtcttccaaggttgtccttgacattgacacccacatacactttttaaaaactggatatgatggtgcacacatgtaatcccagcatggggggaggcagaggcgaaaggatcattgtaagtttgaggccaacctgggctgcatagtgagttccataatagttggggctgtaaagcaagcctctttcatagacaaacttttaattgtttaatactttatcttatactgaaagaaaatataaaatatgttagttccagtcttagaatggtatgcctttttaaaatgtttcttaaattataatttatagttaatcacatcagatataaaaccacttaaaacattcttaaattgtcataaccacaaacattttaaaggcacagtcatcagtctgaatgaccaaatcattctttagtctctttcacagtgggaactaaacatagtttgcttatattgatcatcaagcaaggcaatttttgtttacttattggctgattgattgattgatcgattgattttatttgttttgttctttgtgtaaccctggctgtcctggaactcattcttagaccagggtagcctcaaactcaagagatctgcctgcctctgcctccccagtggtaggattaaagacttgtgccaccacactgggctgcaaatgaatttttatgtactccatctatatgttagataaactcctttaacctgtggctatttaatagaagcagattatgtcagcagtttgttagtaacatgctgtaggactgtgtccctgaaacacagaagcaagtatcttgtggtgttactgataaggttggggtgggggacagtggtagcgagaaagcattgttttaatgttggtgttctttttagactgcaattacatgcctgtctactgttctgtcgattgacttcaaaccttcagaaatagaagttggagtagttacagttgaaaatcctaaattcaggtgagttacattttcagccatgtgctaaattctagactaaaaagctagagacattagggttcctttgtgctatatttgtgtatgatgatgtggtgaagaaatgtgattctctctcttttttctccagtatctgaggatctgtttcagaactttttggataattcaggcactggggaggctgaggcagggggatcataaattcaaggggcaccctggctcatataacaaaaaccctgtttcaagaaacaaatggctgggcagtggtggcacatgcctttaatcccatcacttgggaaggcagaggcaggcgaatctctgaatttatggctagcctggtctagagttgagttccaggacagccagggctacacagagaaaccctgtctcagaaacaaaacaaaacaaaacaaatgactaagaggtagctctgtagaaaagtgcttagcttacatgttttgaagtcatgagttcaatccctagcactgtaaaaacaaaacaactttatttgaagtctcttaaaacagaagcagcttttctccatcttccaagtaactttatataggacatcagagatgacacatgcactcactcacacacacacacgcacgcacgcacgcacgcacgcacgcacgcacgcacgcactcacacaacctttgtacaagaagtaaaatgagcaatgcagctgtagtcaggtgctggcctggcatgcacattgtcctggatttggtccctgacattagagcatgtgggtagacagaaagtgagatggacttcagttttttttttccgtttcttcttcttcagtttaaagccagtgaagcatttccaaagtagtgactttgaggtggaaggctgcttatccactggataagggcccttcaaagggcaatgttaaatgcagatgcacagttgctcggctcttcttactcaacaagttactgagctgcatagcagctcgcaggctccaagccatggtgtaggttatttaataactccagtagttcttactatgatccagccagcccctagttattgagacagaatctcatcgatttatttaataagcttctgcataattcctgagcagttacccctagactgtttttctgtgctatttccctactgcgctccccaggttatttcctgcttgagtcttgctcgcccaggctctttccgacatccaagtgtatactggttgcttatattcagtcagctcctctaactagcaaactgtcaggtagtttgtctgccgtggactagtgaaactcatgtaagtctacagttacaaggagctgtggaggggtttgacctgctgagtggagtgtgtctccccttacactacatccagggtcatgctgttggggattggtaaactaagtgtcagaccttgaagagtttttcagtgacatgtatgtgttttgtgacactgtcttgggatgtagtccaaactggacttgaactttggcccttcctccctctgcctgccacgtgcctggattacagcttgttcccacacacaggcttctgtagtgggtacttttccccactgctgagttgcttgcttggttgcctgcaggtgatataaatacaaaaaatcccacagaattaagaaaacagcacttgtattgtttgtatctagtctaataattttttctatagcaaaagtttccctttattgtttctttttgagcccaggctgaccctagccggggaagatgaacacacattcgtctgttcccttttttaagcactgaaattccaacaggcacttcctttcttgtcttggatgaaacctttttactgcatctgaatgttatttgcattttattttaaaattgagcaagaaaccattatatcagtcccagctgttgggcaattgaggcaggattataggttcaaggtcagctctgagaacatagtgaaacctatctcaaaataaaaatttcttttttattgttttatctgtctggttcttttttgtttttgtttttcgaaacagggtttctctgtgttgccctgcctgtcctggaactcactctgtagaccaggctggcctcgaactcagaaatactcctgcctctgcctcccacatgctgggattaaaggagtgctccaccactcaaggctgtgtctgttttttgaaacagtttctttgtgtaaccttggctgtcctaggattagctgtgtagaccaggctagtttcaaactcaaagaaatcctccttgcccctgcctctcaagtgctggaattagtggtatgcactgccaccacccactataaacatgttttttaaacagctgagaatataactagtgtgagaatgcttgccagcagcagaaaatctctagattcaatcccagtactggaaagagggaaaaggcctttgtacatgttctaaattctgagatagtgagtgtaataacaaagagcatacagaaatagcatacgattctacaactttataaactttctttctccaagttgtaaaaaaagtcaagtcattttgacaaatctacctttttagagtttagtagtgaagtccggcatggtcacacatatttgtagttccagatcttgagagttagagacgggagtttcagaagttcaaagtcatttttggctacatgataaactccaggccagcctgggctaccttataagtcatgagaccctgtctcaaagcaacaaacagaatcccagcagtgaccggtgctgtcaccatgctgaccagcagccgatccctttaaggcagacattctcaactgtgtgttgcaactcctttgggtgttgaatggccctttcacagggtcttctaagaccctcagaaagcacagattttacattatggttcttttttttttttacattatggttcttaaccatagcaaagttagttaggaagtagcaacaagtaactttggattggggatccccagaacatgaatgtattaaatggttgcagcattaggaaggttgagaaccactgctttaaggcaacatacaggaaattggaaatatatgttccacacggagtatcttctggtaagtagactgtaaatagttttgtttgtttttttttcatggatagttattgaatccaagcaacttttttttttttgcaagtttcacatgtatgtgcagaggtcaagggttgatggcattctctaccttatacactgaaggagtgtatctcatgtgcttgctgattctcctagtctagctagccggctttcttcctagcttagggattgcaggcaggcagtcgtgccttccctatgatgggatagaactccagttcttgtgctcatgctcttctcagctgccctgcccccaacaggtttttacaatttatttaattttctcacccctcagtttattcaaatttaagttatgttaacgtttttaaagcattgacactcaaactaaattgaacatattttatgtaacttagcttcatattaattcagttgaaatgctttcaaccttagctacaattaaattctgggtctggtatcaaaaaacactttgatatacatgaaattgactgggagttcctacagtataatcttcagtaagagtcctggatatatagactttcaaaagattggttataaattggtaatggctggagttagttgatccatacttgagagtttgttgtactatcttttgtatgtgaattttttcataaaaaaatttaaagtaggcatttgtggtttttaccctttgccttttaggattcttactgaagcagagattgacgctcaccttgttgctctagcagagagagactgaacactcttatcagcttaccagatccttgatgcctgtgcctatgtgtttggtaacaacaaactgacatcatagaggccctggattgaagatggagactctcccactcctcctgccactgactggttaggactctgtataaataaaacagtgcttttggaaatggcggtgcatcctgtctttcttgagtattaaaccctggtgcagagggcagaaagtgctcgtttacatttgtgtcacagtcgtggtttacacagatgcttcgttgcctttggaacacagatcccagctcagacttaacttagcacaatgagtaaactcagacttggaacctggctttgaaactctgaatgaattgtcatgtgagacaggcttttatttatacctcttattcgagagagaccttcctgtgctcagttctctggagactttctgctaaagatggcgctggctggctgaactcgtgtttactgttgttcctctggattgtgctctgctgagctgcacctccagctagctgtctttgtagtagtttaacaagtatctatttttattttgcataggattttgtttttagtggtttagggttttttgttctcttttgttgtttggcttgttttgttttttgaggctggatctctgaatgccctgaaattcattgtatagatcagcttggcctcaaacagaacttcccttcctctgcctcccgagtcctggaactaaaagtgtgtgcctccatgccgctgctataaccattcctacctagccaccttcaggaagcgggattagaaaagacgatgatctgttttctgttttgttaagattaagtactgaaagtagggaacacagaactggttctttttaatatttatttttaattgtgtgtgtttaatgcacgcacataaatgcgaatgcccttggaggccagaggtgtcaggatctccaaaggttgaagttacatatgcttgggagctgcctgacataggtgctgggaattgaatttaggtcctctggactcacagtttgagatcttagccactgagcgacctctccagccctgacacagaactggttttacagtttagagataacaccattagcagatgttaagggggaaactgcatatttagaaattattttggttaatatagctattaaatacatttttaagatttatttttacttatatgtatacttatgtgactttatgcatatcatgtatacagatcccctggaactggaatttcacgtggttgaaagcaacttgatacaggtagtgggaactgaacagtcctcttaagatatttttaacttctgagccatctttttggtgtttattttgttttagacagggtttctcaatatatccaaggctgtcctcactctatagaccaggctggcttcaagctcagagattcaccagcctgtctcccaggaactgggatagatggcgtgtgccactatgcctggctaagtgtatttttctatgtacagaagtaaattttaaaattcttaaagtagttccctagtgacctaaatcattgattgtttagaaaacaattcagtatactctgtgtccctatgtgcacagagcacttgacctgtctggtcagagtgctggatgtacagagtaccaaatcctcaagtcagagctgcccgtctgtagccactgggcctctttaggaaggccacgtgagcgtgctgccaccagaagcagtaaatgtcaccaactacatcctcttcaaagctgagtcaggagcgataccttttcctaacagggacgcaggtctttcagttcaggggctgctgttctgggattacccgtctgaatctgttaggcgctcaagttaccgccagcaatttgaaagtggagcttggaaggcccgctcccctgaacaagacaacatccacagggcctgggtcgcgatgtggccggaaagcgtggcgggaaacaactcaaaacccggtggaaaaggttctagtacttttatttattcataaacggcaaaatgggcctgccctcgttcgttcgttccttccttcgttcgttcacaccaacactgtctcactaacctttcccgtctggcaggcgtagccttagctcctggtgacgtaggtaagatgagactccctagctttggatcctctggagctgagctgagctgcgctgtgcgggctttgctgtctagcagtggatgtccgtgtccacgtggggtccacgcagattatttctggactcgaagtttctccgctgggccctcgggaggtgagcgattttgccgtgccagaccggcatttttagctaaattcagccaattacaactagggcggtccacacattatttcatacacttctttattattcgcacgcactcaaacgctctggttttcatagttatctagggccgcgggcgggtccatggcgttgccccgccgctggctcgtggcggtgggcatgagttcttaatcgctcgcgcccattaattctaccgtccgtatttgcatccgcaaagtacagcggtggcacccccgggctggcaacttccacagcttcgggaaaatgccctctgaggctatgtgttctttctttacagcctggctgacttcactctggataagagaaactagccagtgattttttttttctctaagaagataactgcttggacatagaaaaactacaatcaatttgatgtggaaatctagaaggatggggattaattattaaatagtgtactcctcagaaagacaagtatgacatgttttctcatattaaaaaaaaaaatccaaaaaaacaaaaaagccgggcgtggtggcacatgcccaccccagcactcaggaggcagaggcaggcagatttctgagtttgaagccagcctggtctacaaagtgagttccaggacagccagggctacacagagaaaccctgtctggaaaaacaaaacaaaacaaacaaacaaacaaaaatccagaccttttttttttaatgtatgttatggcagatagaactataaagtggggttttcagtaccagatatttaaagtgagaatataactgttccaagatatggctgaaaagatttttttcctgtaaggaaaggggaaggtgagggagagttcacgggtggggggggggggcgctagtagggcagtataggaatgagaaactgggggaagggaagctcatgggttggagaagttgagggtgggggcagggtgagaagagctgggctgccagcatgggccatgtagtcggtatctgagatgccgagagcctggtggctggccagcgtgcatttgggtcgctaataggcaccacaaatagctgtttcagacttgacaacatattccatctatagcatatgtgatacacaagagtagaggggggctgttgggaggagcagtctaaagggacggggtgggggcaagtgtgagttcagccattaaataggagattaaggaagggaaaagccaaactctgcgtgtctcatctcacggaatctagacttaacagtataactactgttttatacttactgttatgtcatacaaatgtgacgtggaagcaaaggggggttatttgaaaaaaagagagaaaataggatgggtgaagaggagcagggaaggaggatatagaagtacagcaaagttcagtgatgagcatgctataagagaaatatttgtgctgagtgtggtggtctgaatgagaatggccccatcagcccagatatttgaattctgggactactctcgctgttgggactggtttgggaagggttaagaggtgcagcttttttggagaagatatgtcactgggagcaggctgtgaggtttcagaacccatgccaggctcagtctttttctctatctctgtctgtctcactcactcactctttcttgctctctctcctctccctcctctctccctctctctccctcctcccccctctcctctctaccgttagagcaggatgtaagctctcagcactgctctgctgccatgctcaccaccatgacgattgtggactagtcctctgagactgtacgtgtgctctcaataaaatgcttcttttatgccttgttttagtcatgctatctcttcaagcaatagaaaagtaacttaagatatcaagcaaaaaggaattaaacaaacagaaaagctactactaccaatgaaggcataaacatttttatttatttttagttgattgattggtttggtttggggtttggttttttttctgagacagagtttctctgtgtagccctggatgttcctggaacttgttctgtagacctagctggccttgaactcactgaaatctgcttgcctctccctcccaagtgtgtggattaaaggtgtgcaccaccatgcctgaccattatctttattgttgctatggttttgtcactgttattattgcctgtgcatggctgaggggaggcatgctgcactgcatttgtggaggtcagaggacacctctgaagggttaactgtcccttccatctttagatggcatctgaggatccaactcaggtctccaggctgtgctacaagtgcctttgccagctgtgctcactggcccagaaacctgtagatatgtacaaaaaaggagagagggggtgggtgtgtgtgtggagagagagagagagaggagagagagagagagcaaaagaaaggtaagtctgtctgtaaaaaatcatgagccgggcgtggcagcgcaagcctttaatcccagcactcgggaggcagaggcaggcagatttctgagttcgaggccagcttggtctacaaagtgagttccaggacagccagggctacacagagaaaccctgtctcgggaaacaaaaaaacaaacaaacaaacaaacaaaaaaaaacaaaatcatgaagtaggtctgacgctgacaatgacggagcttggtgaagcggacggagcggagttagaacttctggtggccactgagcagcagaaggtgcagttcactgcgcaggtgcgttacttcatggaactgtgttgggataagtgtgtggagaagccaggaagccggctagactcccgcactgaaaactgctgcctctctagctgtgtggatcacttcattgctatctactctttactgtcaccggttggtttgcccagatcatacagaaaggagggcagtaggccagaccttagaatgacagaagaccaaaaacgtgttacctagcagatgaatggccagtggtgtgaggcttgttaatgtgtcaggttgacattaggcagttaccaagtctgttggtgttaaaacgtagcagcaagtgttcaaaagtgaaattttatttatgggaattcagtaattccaagttgtatcacaccagttaataaatgtaaagcctccaaaaaaaatcatgaagtaactggagagagagaattatagtgatttttacttataacatcacagttacaaattagcaccaatcctgtaaaatattaagtaatcattaaaacccctgttctgagaactaatcagagatgtagaaatgtaatttttttgaaagggacagtatcttgctatatcagcttgatcctcaacttgcagtccttctgccctgactcctcagtgttgagattacaaacatgcaccagcttgacatcacgtagtattacacacaaaacaggatacaagatatacagtgtcggggtgctgatgggtagagttcagttgcaaaatgtctcctttcgcgtgtacgagggaggcattgtgctcaatctgcagcgtagaatccatggaacaaattcttctggtttaatccttttgtgtgtgttttagggttttaatgttgtgcagagataccatgaccaaggcaactcttcaaaaagcaaacatttaattggggctggcttacagttacagaggcttagtccattatcatcatggcaggaagcatgactgcgggcatcttggatctgcaggcagcaaggagagactgtgtgtcacactaggtgtagcttgagcataggagacctcaaagcccacactgacatgcttctttcaacaaggccacacctaacagtgccactccccatgggccaagcattcaaacacatgagtctatgaggggcattcctattcaaaccaccacagtgtaatattttcagtatggtgacggaaacttctgagtctcaccagtaggtcccaccttacaagtgttctgtgcaagtctctgcttcccttcctcggagccttgtctaaagtcagaatagcctgcttgatctgcaaaccctatacaaggaagggcagggcactcaggccaactggaactgatggctaaatgttccagcctcctgggtgcatttctggagtggactggagacattcctaggatcccgaaactatgcaaaatgcagagcatgtattgatttcttggagagtccctcagctttcatcagatattcaaagtctgtttttccaagaaaaaaatcaaaaacaaaaacaacggatggatgacaacaaactgttcattgattgcttctggagaaatttaaactgcaagtcatttaagatacatttctgcatttcatgttttattttattatagtctgtattctttgagatagggccttattatgtagctctagctggtttggagctaggtatatagaccaggctagccttaaactggggtaatcatcttgcctctccctcctgagtgcaggaactataggcatgccccacatcagctgcatttttttttttacaattaaattacatttatttggtgggggtggggggaagatgtccatgcctcattgtgcatgtggtaattgaaggacaactggtgggaattggttctctccttctaccatgtaggtctcaggaaatgactttaggttgtcaggcctggcaataagcacctttacccactaagtcctcttttcagccctcgccttatgttttaagaagggacatgtgcaaagaaacataaaatagcttggctatgcaacgaggcgaaaatcatgagccaaactgggcctagtagtagcacatgcctttatttaattcctacacttgaaggcagaagtgaacagagctgtgagtttgagaccagcctgatctatagtccagggttcaggccatactcacatgggaagaccctgtttaaaaaagaaagaaatcatgattcattagatcatgtcattagaaattttaagacttttagaggaagggctgaagggatggctcagtggttaagagcacttgctgttcttgcagagaacccaggtcctaccacccagatggcagctcacaaccatctataactccaattccaggggatccaaccctgttttctggcctcagtgcccactgcatgcacataatgcacgtgcatatgtcaagcaaaacacttataaaataaaagtaaaataaatcttaaaaaaattcattttggggactggaagagatggctcagaggttaagagcactgactgctcttccagaggacctgtgttcaattcccagcacccacatggtgactcacaaccatcggtaatgggatctgatgccctcttctggggtgtctgaagaggaggacagtgtactcacatacatagaataaataagcatatctttttaaaaattcactttctctccttttccttcttccaactcctcctggctactgtgcatcaggcccctgccaggtctccccactctcaagttgatagcctctttctctttaattattgttacatacatatgtatataagggtgtgtgcaatatacataagcacaacctgttgaatcggtatcagcagtcaggagttggctacgtactttgttttgggtcgggacccagttccacattaacatgttcattgatgttaccaaggttcccatcttgtttatgcagtcattctaggacagactgttttatggcagacttcctgatattttgactcttaaaaatctttcttccccacctcagattttgtttctgggtcacagatacatgaagtatgatatggatgtatccacggggctggggtccccacagtctgttggtctctgcatggtgtccagctgtggttttctgtagtggtcgccatttgctgcagggggaagcttctttgatgagtggtggctacacttaggaaaagtgactctcacccagactcggcctagtgttggcaaaggggcagcaagaattcaatggcgaaagaactgttgttgttttgacaaataatgttgcaaaactgggcaaggtccacaggcaaaaacatagattgtgaaacaaatcttccacctttcacaaaattaatttaaaacgtaccacgtacatacctggtgcctgaggaggccagaagaagacatcggatcccctggaaatggagttacagtgtgactgctaggtattgaacctagtctcctgcaagagcagcaattgctagtaattactaagccatctctgcagcactccagagagtgggccctgcatcctacctgggcagcacagtagagctgaccctgttgttataggtatgggcgagccagtcccaagggcaagagagcaggagagctggccctgccccttgctgactgtggctttggcattggatgggctagcctgggcagtactggagagctagctctggtggtgtgggtacaggagagctggcagaatgactggctcagctaccacccaggcccagatccaggtctttgaattgatcctccccaacatctgtgaactactggagctcatgaaggggctggtcctacagatccaaagctctaggatcgccatgacacagggcaacagcaggaaatcagagaggacccccagctgaggatccagtgttgatggtgtaacagaaaccagaccagtgactcattgcaatggacatttgcaagcaaagatgtgtggacaaaagggtgtactgtgggacacactatgacacagtacagattccataaagagactttttccccccctctgggggagaggttgtaaggacggagggcaggtaagaatgcatggggagatgagcaggattggggttcacgatgtgaaattcataaagaatcaataaaaatttaaatgaaaacagatgtcaagccatctcttcagccccattttattttatttgtacttatctccttgtgtttgtgggggggggggtgtatacataagtgcagcagccacagaggccagaaaagggcattagatgttctgggactggagctacagactctatgatcaggcccagatcaggcccagtgtaggtgctgtgaaccaaatatgggttttctggaagaacagcaaacacaacacagagacatccctccagcccccctttcttattttattttattttattttattttattttattttatttatttatttgagataggttctcactgtacagccacagctggtctaggataccccatgtagaccaggctggccacaaatttgcaccaattctctctgcctcctgagtgctgagatcacagaaatgccaccacgtcagactcatttccatgttttacttatttcttatgtaaaaacaaaaaagcaaaaacaaaaaaaacttacagtttaattaattaataattaaactgtgtgtgggcttgtatgctggcacgcgtgtggaagtcagaggacaaattgcaggaattaattctctccctgtccgggtccaggagattgaactcagttcaagcttggtggcaggctccctctgcgccatctctctagcctttccttgttttttcttttatttatttatttatttttctgttgttagcagatattcactgtataatatcagaggtttcactgatatttgtacatgcatacaatgtgctttgatcatatttagtgcacatttctagttgttggggttttttgagaaagaggtttactctctagacaacgctggccttgaacttatgatcctcctgcctctgcctcctgtgtgctctgataactggtgtatgcttccatgttcagctgtcatgtggtttttgtttttaatccaactccaaaagaacaattcatgaaaagaaacaaaatctactgaattcaaattaagaccttctctctggaagacaagaaaattaaaagatcgccaggcaatggtagcgcacacctttgatcccaacactcgaggtggaggcagaggcaggcagatttctgagttcgaggccaacctggtctacaaagtgaattccaggacagccagggctacacagagaaaccctgtctcgaaaacaaacaaacaaacaaacaaaaaccaaaacaacaacaaaataacaaaaagaaaaagaaatgaaaatgaaaagatcaactatagaacagggagatatatttgtaaaacaactacactaatagatattatgtagaagacatatgaaggagacctaaaatccaggctggctctatggccagttggtagaatgcttgccagtgcatgaagccctaggtttgatctctagcacagcactgcgtaaagcaggcatagtggtacacacttggcaaccccagcaccccggagcatcagaagttcaaggacatccctgtcatatagcgagttagtggccaccttggggtacataagacccccaacaccctcccaaaagaaagaattcctaaaactcaagaatagaatccaattttaaaattagcaaaggatctaagaagacatctcaccaaagtaaaacagttgtcagctggggactggagaggtggcctggaggttaaaagcacccgatgctctctctcttccagaggtgagtgcttagttctcaccacccacaccctctgctgacattctctggcctgcagcacatacacatatgccggcaaacactcacacctaaaataaaatgaataaatcgaataaaaaacgataaaccgttggcaaacatatatgaaacaagatttaatattatgtcatccaattaaatcaacaatgaaattatgctaatctattaaaaatgactagaattttttttttaacttacacaaaattctgctgaggatatagaacgccagaaacttgtgggagtgggaagataatttggcagtgctttacagagttgaacacaaccatgctgcgccactcggcttatgtcacacgaacatctgcaatagtagccttatataactgtgccaaactggaaggaagaacgctgctctcaacaagtggataaaaaacaagctagaacatccacacgatggaatattactgaacactaaaatgaaatgagctgccaggccacgaaagacattgagcaaccttaaatacacgtggaaaaccagcttgaaaggttaacaactgtgtgcctccaaccatatggtactctgacaaaagaaaaagctatggagaaagtaagactcaacggcattaggggggttgtagtaggtggctggaagcataaatgggctaagcacacgtttatgggggtaaaactgttgcctgatactgtaatggaggataaatgacactatgcatttgtcaagccccacagaagctgggtgaggtggcacatgcctgtaatcccagcactccacaggctaaggcaggaggatgctgagtttgagaccagcctgggctacatattgagtttcaggccatcacaggctgtgtagtgagaccgtgcataattaaaccataataataatagtaacaacaataatcgataatggccagagaggtggctatgcaggtaaggatgcttatccacagtcctgacaacctgatttgactgtggaacccgcatggtgaaaggggagaaccagcttccacgaggtaactgtcctccgattgtcacacacactttggcacacatttgcccctccacacaaaatttccccttttactaaaaatagattctgttctcatacaactcattctgattatagtttcccccctctctctcttcctcctggttcctccccacctcccttcccatccagatccactcccttctgtctctcatcagaaaagaggtttctaaaagataacaaaagaaaccaaccaaccaaacaaacaaacaaacaaaaaatacaataagataaaacaaagaccatcgcattgaagttggacaggacaaaccaagttgggaaagaaaagagaccaagagaggacacaagaaccagagacccactcattcacacactcaggaatctcataaggaccctacactggaagccaccataaatatgcagaggacttggtgcagtccatgcaggcctgtgcctgctgcttcggtccctgtgcattcatatgagctttgctcagttgattagagggctttgttctggggtcctctgtcctctctggctcttattcctgcttcttcttccacagggtttcctgatctctgatgggagggatttgatgggcatcccatttagagctgcctacacaaatagttcttcaacggaaaagtgagtaccagggttgctataaatctctcaactccccctccccctccccatctcccctctccctctctctctctctctctctctctctctctctctctctctctctctctctctctctctctttctctctctctccacacacacacaccacttgcagtgcttgaatgaagctctggcttgttcttccaacatgcacaaagttcatctccaacatgggggttgaggagaacactcacatcagcttatgactgtgccaatggtgcaaatgtagcctataacactgggagggacggataataacaaaaaacggtgtgtaagctgatgccgggactctaagtacaatgtgggcaggttctctgtaggtctgaaattattgtaatgttgggaatcaaatggtcctgagtccttccatggctctagggatggatccacctgggaaagtgaaggaatgaagaaaagatagacagacagacagacagagaactggggtcaggtggattgtgctccttggtagttctgcccgtcttctgtaattttctctgagccttatgtgtgggcttgtattacagatgagtcagttagggtctctaatagtctccatctgttgcaaaaaaaccttcttgggtgatggcagctccatgtgtctctgggcataaggacagatagttagaatacagtcagaaagtatactagtttaggaaagtggtcctcctctagggtcagtgagctcaccagccatgggtagttagctgggtttacagtgccaggtaccacatgggtagttagttagctgggtttacagtaccaggcaccagccatggatttacagtaaaaattccctcctgttaagtggccgtacatccaagttggttatccccaagacaagatgccagattataaatatataaatatataaatataaaaatataaaaatatataaaaatatataaataaatatataaatatataaatatagaatgccatctttccactattggggttggagagatggctcagcagttaagaacaatgggcaaaccttccagaggacctggatttccaactacttataactccagttccagggggtctgatgccattttccaattctgtgcatacggattgagcacaaacatgcaagcaaaacttagaaacaaatacacatagaaataaataaatcttttttttttaaatgccacttgcgccccactgtgaatagcttgcccatccggtctgtcgttcacgggcttcacagctgggcagggctatggtcctttctccctgggcagcttgcatgtcaccttccaacactgtggaagccctccctccaaaaggacgcccccagggcagctcagcttcttcattcctcgatgtgtacagtgtctgatgtgtacggtgtgttaggcaattggggccttaccttcaaactctggcaagtagaaaggatcagcagatggcttagtggatgaagtgctggctgcctagcatcaaagaaaaagaaagcataaacttcgttttgtgagcaaataagccaaagaattccccggtaaaatacagaaaaagaaaaagaaaaagaaaaagaaaaagaaaaagaaaaagaaaaagaaaaagaaaaagaaaaagaaaaagaaaaagaaaagaaaaaaaagggtgtgggtcatttcttcagtgttcccacatcctgtaaggagcacagcctagagactgccttaccatgctgttcacgacctgtccttgaatgactctgcttttagatcactgccctgagccaggaggtgtcacactgtacacattcatggagtgttctccaagttcccggggcatctatttctcactatgcagagcgcatgcgccaccaggaagtacacagcctcggggtcctgatgcctcagtttcctttaccagcaagcttcacaaatagtcagtcactgcctgcaggttagaatggcttcagctccagcctgccattactccaaccttgtcttatctggagacacaaggtgacatctggagacacaaggtgacatcaccatcatgtggtggtgtttggttctgtctcagatagagcttcttcccacagactccttttcacaaggaagaaaagaagaaagctcgcagaaactagtctcgaatgttctgtaacacctcttttctatgctgtgtcttatgaggctgatcagtgaagactttcaactgaattgtgctcagtttaaactcaggggttctcagcgtctcacatgaaacgtctagagggtcttttaaaattacttattggttttaaagatgtgattgttttattggcatgcgtgtttgtttgtgcaccacatgtgtgcagtacccgaggaggccggaagaggtcaccgcatcttcaggagttggagttacagatggttgttaggctgggaaccaaacatgggttctctgaaagaacaatactggctcttaactgcggggccatctctccagtcccttcgggggttgttttcaaagtgtgtaagtcagccccacacccccaaccccacctccaccaccaccaaagatagcacatcagtccagaagccaccccctcaactgctgatctgcgcatgcgtgttttgagagtgctcccgagtcgagtctgtttcctgaggattaggaaggaacatctgcaggagacttgattgatcacttaccctcaggtctaccagggacccattccgcttcaacaccctttggaccagtgcgcagcaagcttatagtgtactaaggtcgggtttctggaaagtgaccttgttgtgtgttagattcatgttgactgtgtctctgctaatcgcacccttgactccacagctcgtggaaggaataaaacctgtgaatgtttgcgaataatgaacacggcaagctcatcttagggctcccccttcaaggatttgcggcagatccaccatgtctatctacagtcctctgtctatgagaggtctttcccagacccagaggattgcaaaaggaagagcacagagaattctgacttagaagatggaaatggccggcgctctcgggtgggaagttgtgctgcttgagttgggtgtgcctgttgatatttcttttgagtggttgtcacaagaaaacagtggggcaggggcatcctgtctgaccttcttgcatgagggtatccgcaaagcccagttaaccaggttccgcagcttctgcacagaccgtgctgcagtgattagcccttgctgggactggaatgaggatgacaacaaaacagcagaacaggaaaaacctggtttgcctgggcagagaaccagtgctctgcggggaggccctgctgacagcctcagagggctcaatcaccctcacaggggttttccagggagagaagcccggagcagttactgactggatttaggtatcttgtccacagctaccaccacagtacaaccaggcagcctctggaggcttagctggcccttgtttctgggagttcatgcgagtcttcaacaagagggaagaagagagtttctctttcaatatcagcgttaagcaaaaaaaaaaaaaaaaaaaaaaaccattttagatgagtttgtttttatatgtatgagcccattgcctgaacgtgtatatttgcacacacacctgacacccaccccaacctgtgttatttctgaagtggcaagagctgtgggacaggcaagtttaccccctctaaagaaagtagtctgcttgcccaaggagaaaagccatagagtccttccactgctgggtgacctaaggagactgcttgcttctctgtaccctctctgttaggaacaactctagaaaatgcactttttctagaaaaagtggccaggggctgggcatgatgccatatacctacttgagcaacagacacaggaggatcaggagttcaagggcatcttcagctatataagaagtctgaggccagcctgggccatgtgagactgtgtaaaaataaaaattaaaaaagaaacaagcagagggagccagggaagaggctgatcagaggccgtgggattccatctctcctcagtttaggaaacatgtttgtgtcccagcaccacattatggctcacagtcatctgaaaatccaatgaggagatctaatgccttcttctgactttcaagggcaccaggaacacatggtgcatatacatatatctagacaaaatactcatacttagaaaataaaattaaataatctagaagaaggaggaggaggagaggaagaagaagaaagagagagaaagagagaaaggaagaaaggaaggaaggaaggaaggaaggaaggaagaaagaaagaaagaaagaaagaaagaaagaaagaaagaaagaaagaaagaagaaaccatttcacactgatcaccagcaagcataactttagttttagtgatggtcaaggcaagacaggctgaatctctccggggcagagagctgaggcccttcctctctcattgaggaaaccatctctgagaccaggtgtgccagcattgagtcctggctgcttccagcagggtgggaatttggacctttgtagatgcaaattagacatgatatgtgggccaaactagcctcctggcctgcttctagacaggctctgtcagggacaaccccagggacctgcagcctttggtaccctgagaccaagtccttcctgccacaaaccatgtgatnnnnnnnnnnnnnnnnnnnnccaagatggcggcaatgccgtggggctaggaggtggctgggagagtaagccagcacagtcagcctagtacagggtccgcctagctcctagtgctagccgcttgttaatacaaataccaggtctccatgtctttattgggtaacaaagaggacagagaaaagcccccagaattacatttacaaaaaatgaatctttaaaacaaaaaagcccaaggcccctctcagctgtacatcaggttcaaggccagctttggactatcgacaaagcaaaacaggtttaatttatttatatatatttacatgtgtacatcaactgtagtaaattttattttgttgttgttgttgttgttttgtttttggggtttttttgtttttgtttttgttttttttcgagacaaggtttctctgtatagccctggctgtcctggaactcactttgtagaccaggctggcctcgaactcagaaatccgcctgcctctgcctcccaagtgctgggattaaaggcgtgcgccaccacgcccggctcaatgtacacaaattgactgtctctgtgaagtggggaatcctgctttcctatgcagtatatttcatggtcactgtgaagtaggcagtttcttcagcgcaagcttctcaggtagagctaaggatgctcaactgacttttcatttgtgaaaacctccagtttcaggttttcttgcacaaagtgagggagctgctgctccccccaccccagtggggaaacagcccatgaagcaggtatggcggtgcgcaccatattcctagaagttggaaccaccctgagtttgaggtcagcctgagaccttatcaaagaaaaggcatatgaatcctagttctgacacttgcccaccctccacccccgactccagagagaggctgggaacggtgaagagcctgttcacagagtgaagccagaaattagacagagtctctctgtgcagccatggctggcctgaaacttggtcgatcagactggtttccagggtgctggattaaagatgtttgccaccacacctgacctgagacagtgcatgtactgtgctagagagaacgccggctagggctggggatgtagctcgttggtggagtgcttgcctggcaatgcatgaagtcctgggtttgatcctgagccccacacaaaccaagcatgctactgcatgcttataacccggcacttggaaagtggagatagaaggggccaaagttcaaggttagcctcaccatatctggaggctagcttgggcgactccacgctatgttttaaacaaaaggatacatcactgttttagagctgctttcaagtgtccatggcatcctaaacttctaaaatgtgatttcctgagaatattttcatatccaaagcagaaaccctggctgttcctatcagtccccctccccactggttccatacctgagcaagcagacatggccctgtatatctatacatggtttcttcagccagggagtgaacttcccacctttttaaagatattctgcccccccccacccccatcactaatttgttcgggatatatgaggcccttttttcagggtgtggagggggcgagcctctggcctcacctgaggagaactgtttcttcctgagagagcacaccaggaagcaagctgagaggggccctggatttagggttgtctctcactccctttttgttctggggtatacagagtcctcgaagccccgctggtcctggttcagctggaccctcacagagcagagctgttaggtccctgacctgcactgagagcctgccttccccagggctcctcaccccagcctgttgccatggagaagatgatgggtgtgtgggtcaatgccccctggagaaagaaggtctgttaaggaggccttagaggacagagaggtagccactgggaaacaaactcatttgatgacctgcagttactctcagaagccagtgaagtttgccagcctcttcgagacagcctagctcttccaactctccatatcccaataggaaggtatggccgcttggagcctagattgtgcaagagattttgcaacctcatgatgacttttgtcacctatagagaaccgcaggccagctcacaagccaacttgcttatcaggttattggagtcaggaggattatcggccttgggatggggaaaccctctcttacacagcttccttcctgccccctgactgggccccatggatggaggaaggcttcctggacctggtaacttggctgctgggctcccagccaagtatcccgaggacactcctgacacctggattcttcttctcttcctggggcgtggggaccctgaatgggcgccttctctgcatagaaaacacccaaatgtgtcagggctctgggacagcaactccagccacctgtccagtttgttctgtatgacacctccgaacccagtgaggaccctttctctcacacagatcgtgcctcctaccggcaaggcccttatctgccaagactgggctataaacctggtgtgaacctgcccagctcacggcaggtgcccagtgacggttctgtctcaaggccctttaccgacacagtgccatcagtcagcaaggacatgtgcacatctgacctgtaacagttgctatgtttgaaatcttaatatactaccagagtgctgtttgctctacttaagatttatttctttgtttgtatgtcacatgtgtgtaggtgacacgcaggaagaggccagaagagggtatcagattccctggggctaggattatcagtggttgtgaggggccgaaagtggtgttggggtcagaaagaacttgagccttctggaagagttgtttgtatgttttaggatcttttgttttgttttttgaaacatggtctctttctatgtaggactggttgccctggaactctgtatagatcaggctggcctctgccttccttgttgggattaaaggcgtgtgccaccctgcctttaggatttttttttttttttttttttttttttttggtaagggaatgctttgaaatcaaaacagtttatcacaaagaaagagcagaaaacacaatcttcggaaccgcatgccttagtgcaccggacagaacagagtgtcacttgcgcatgcggctcctgagaatcagcacacgccacgtgctgagaagtaaatcctgtgctgtaggctggacagacctgagcttcagagcctcagcttgccgtccttttcataggactttttcatatgcagaaaaaaatctgtctcccctcatttccagattcctttctgagccctccacctccccgcagatcatagcctacagtcaggatggagaaacaggagcaaactagaccggagtttgggccttcagtgcttcgtttctctgctgtttcacccactgacctctgaccctcaggtgggtccaagaaaggggcaaagcgctggctaccgccgcagatgcaagagtgtcgtggggattgttcattttattcggcagcctggctggctggccgcaccttagggaatctggctcctgacatcatcttgcattggccagctcccctgcaggactgaggggagggctcaggaaataccaaggttcgctcaggacccaggctcccgtgctacaaactggaagggtggaggaggggttcaggtcctcgggtgcccctcagctgtagctttagaccctcgcagccttctcttcacccctgctcaggcctctttccacctggcctcctctgctgtttccttggctttttccctggcttgctctcagttcttagaaaaatcccctccaggaagtgtgttgccgcaaaataatgcaaatctgctgtggggttcccaggcaacatgcctctgtctctgaggagacaggggagggaggagttctgatactgaagagggagggcggggcgggtcctgagcccttcagtgcccctctgcaggcatcctgatgccattcggcctgtgtctaagggaccagggagccaagctcaaccccaggaaagaccttgccaaaccttcaaatgctcagtggtctttatgtacaaatgctttatatgcattacatttttgtatgtattaaagctaacgtcaatttttttaaaaacgattttaaataatttgtttattatttttctatgtgctttggtgttttgcctgaatgtatgtctgttgacatatagggtgttggatcccctggaactggagttacagacagttgtgggtggccttatgggtgctgggaattgaaactgggtcctctgaaaccagttccaagttaatgttgcttatatgttaaagtttatgtggagctggagaggtggtacagtggttagagcctttgatgctcctccagacggtctgccttgggtgtccagcacacacccatacacagaaaataaaaataaacaaatagtttttttttcttttttctttttttttttttttaaatctgtttacttaagttaaactccttgtccagtgtaaagcaggggtggctatctgagaactgtcccctcatgtgggccttatggtcacagcagactgagacccctggaacctgagttttcagacttgtgcctaggtccatggtgtaatcccagcacctggggagtgagggtaggaaagtcaaggctgtccttggctgtatagtaaattgaaggctaacctgggctacatgagaccctggcaagaaagccagctgggggagaaagaagggaggaaataaaggacgaaagggggtgggggggctccggaccaggtaccgggaagcctcaccactatgagcccacatggcatatgactgggatgtaagtgtcctacagtcaccatttcagagcagagagggagagggaggtggttaaacaatggctgatgtcagtctcctctcagcagtcttttggggttactgctgtttggagtaggatctcactctatccccagctagccttgaactcctggtggtcttcttcgggctccagagtgtccggattgcaggaggatcatctcctcgggtctcatcgctgtctatgcttcccagccttccccagtcactccttagcctgggtgacggtctgaatggaatatgtctgctttcctggctgctttctgctcctgctgtttttgtctcccttaattagaccatgaccactctgagaggaatggaatttgctgggctactcctaattgaggccaggcgggagcaacacacattgagcgtctatgacatacctggcccttgagttagtgctgagtataagcactccctacttctcagtggcaatcctgtgagatagatgttttctcgccttacagatgggattctgggcctcaaagaaattaatgagtggcctaaggtcacacaggtgatgtatcaattccaaaccaggcccatttgaaattcgtgagtgacctcgagtcctgtgttgtccctgtgttgtcgggcagggtgtgttacataatgtgcagctctcagttgcaaaatcccaacagttggtgcattgtcttagccagatccaaacacaaaggttcataccttcactgtacccaacaagggggtgagaggctccttggaggtccataaagatgtgggcatttcacccgtggctctctcagatggcctgagactgctcatcagaacacaatgacaggtagagacatgaagccatcctcatgtgctcttgaagctatagacctaacaagagacaagccagagcaacttcacctaactcctgaaaagtagaatttgcctcctgctggtaggcattatgtggctaaatttattcagctaagtgtgatggatctgggacaggaccctacctaattctcaaggcccctgttaaggggtgaaaggctgcaggtaggagttaggatacagctggggagggtcaaatctctcttcctacaaaggacactgacaaacaggtacaggtcagtaactcctaggacaagtctcctgtccagccccgtgaaggacattgaggtggatacacagacaggctctcctcaccctgtctccaccatctgtttaagatctaggacagagcaggctacagaagcctaggggcttctgtttgtgtctgtgcacgtgcgtctgtacatgtgcgtgtgctgctgggagtaaaccagggcctttgtgaattcgaaaagcgactccaacactgtgctgtactcccctgcctcaaaactaagacaccttcttttgtttgtcctgtagtcctgcagtgcatacacatgcgattgccagagttcatgtgtgtgtatgtgtgtgtgtgtgtgtgtgtgtctttgagagaggtcttgctatgcagctctgactggcctcaaactcttcccacctcagccttgtgagtgctgggattcgagggcacacgcccacccatcctggcaggccttgtactcttgatcatattctgctttactctagagctggagtttttggatcttccttctgtccgtccgtccttcctcctcctccccctcccccctccttcttcttcttttctctctctctctctttctttttttttgttttttcgagacatggtttctctgtttctctgtgtagccctggctgtcctggaactcactctgtagaccaggctggcctcaaactcagaaatcctcctgcctctgcctcccgagtgctgggattaaaggtgtgcaccaacactgccaggtcttctctctctctctctctctctctctctctgtctgtctctgtctctctctctctctctctccttcttcctctgtcttgtgttgctgttgcttgtttccttgctgttttgttttatgggtgtctcacatagcccagctgcccttaaattcactttgttgccaaagatgactttgaattcctgaccctccaagaataaatagtgctagggttacaggcactatctatagctaggaaccttttctctgttttgagataggactgattgccacccaggctggctggtacttatgttgtcaagtgaccttgaactcctgcctctacctcccaagtgctagtattacaggactgtgccattacacgcagctagaacgaagagtcttaactgaggcctacctacaagtttgtacaatgagttcatctacccttccccacctccaaacaagcaaatgtttctctgttcaaccagactttggctctgaagatgagctctctctgtcacttggtggcttcaagccttctggaatgttcttcattgcatatctactacaccaccataacctgaatactaagaagctttaactttgcataggcaaatacacttcagctttggattatcagaccagaggctactgcaagtctttattctctctctctctctcttttctgtttcttttgtggaacaatagtatcatgtttgtaggagaaggctctggggcctgtagggtagctacaggctgtaggagcaacggtgaaacaagctaagattgggtgcatgggagacctgagtccttcacagacttagcatcaggtgggctggggaactgatatgaagatagaaaagtcctggggtttcttgatttgcttgaccaacattggctgcccatttccctaatggctttgggccatacggcccagcatccaaccctctgggctcaccagctactgcatcagaattgcttgctgcttctttgagtgtctgtctgtctgtctgtctgcttttgaagtaagatctcaccctaatccatacttaccttgaactcgatcctcctgccgcagtttcccaggttctggaattactggtgtgtaccaccaatgccctgccttgcttaagagcctatacattcttgggttccacactggacattctgatctcagtggagaacaggccccacagtccctggtaattctgacagtgagcatttgagaacttttgttctacatatgcatgtgacacttacactgctgagtataaagtctgtcctaccccagacagcttttctcagccagcgccgaagtactcatggctagcatggctgctgcggctgctgctggcttttcttagtgtcttgctgttccctcctgtgttaggaactagccagttgggtgtgagagtagcaaccttgttcccaaggcacactctgtagccctgtctgggccctgccctgcaggactctggccagttgacagtttgggaaaacccctgaaggagcgagggagggagcaacagaagctgctgcagaggtgggaggggaaagaatcactgagggctggcaccctccttcccttgaatgatctctggcttcctgcccaggctgaggccaagtttcactcctgggcctggctgtaggcttctccccttggagtgcctgcttcaccctacacaagtgattccccatgcccacctctgttctctccactgcagtctgtgccatgtgaccttccccctataactctgcaaatcccagttcatcagctcgtccattgctttcatggaactaccaggccccagagttgattcctccctccctcttgtggtgcttgggaactggcacgtccttcacgtctgtctcaggaggtcacacccatctctaatgtttgtggatggtctctctctctctctctctctctctctctctctcacacacacacacatctaaaagaaaaagttctaattacaaatccctctagacacctcccactcaacaatgtccctgaagaccaagtaaagaagcaaatacaaccagttgccacattctaatggaccgagggatgggaaaacaaacaagacaacagtgagttgcagagtctcagggagggggatgcacgctgaagtatggagtgctggatctactgagggtgtggctgaacttcactgcactcacttctgaaggttagcggaaaacccactccagaccgtgtccaggagaaaaacatccttgaactactccagactacaaagctaaagcagaaccagcttccttctacacctgctccaatatgcagctgtcaggggtggagaggccagcgggtgctttgagcgctgacgggaagaaggcagtgatcatctacatacatgatggatggacatgacctgagacagacgggagggatgcatcatgagagggaggcatgcatcaactctatgtcctggtggattcattaaaaacaaaaagggggtggagatctgatgaatttaaacttgctggctggtgtgggggagacccacctggcatagactacattgaaggaaacagaggcaggtgtggggatcaaaaggaagtacatcagtcagtgtgtgtgtgtgtgtgtgacagacagagagagagagacagagagagacaaggagagacatagaaagggagagagacagagacacagagcactgtctaaggtcaaagacaacttgcaggagctggttccctttatactatgtaggccttggaaactgaacacagatccccatgctagatctgtgccatctccttggccctgtttttgactttattaacgttgtgtatgaattcttgcacattgctgcagtggtggtggagggagggagctgtgtagactaggctctcttttccaccatgtggcttctgcggatagtgctcaggtcttcagctttccagacaagcaccctttacccgctgagccattttgctgacctgagattggcttttgtaaatctaaaatccttataaattaatataagaaacaccattaaaccgggcagtggtggcacgcacctttaatcccagcacttgggaggctgaggcaggtggatttctgagtttgaggccagcctggtctaaagagtgagttccaggacagccagaaacactgtctcagaaagcaaacaaacaaacaaacaaaaagcccacagcatgctggagagacaagtgagtagcccgactgagagacaatagaaaatatccccacattgggacttagagacatctagcagatgattaccagggaagccaggtagctggcgttctggatccagagagtgccccatggaagagtgacccctcgaatgaggcttcctagtgaagcgacatatgacaagtagatgacatcatcaaattggggcttacaaacacccagcagaaatcagctgtggacgatgaggtggtcagctagagcgtccattcaagctttctctcctcataaattcccatggctgagcctgtgctcctcacccccactgcaggctttttttgggggggggcgttgagacagggtttctttgtatagccctggctgtcctggaactcactttgtagaccaggctggcctcaaactcagaaatctgcctgcctctgcctcccgagtgctgggatcaaaggcatgtgccaccacgcctggttccactgcaggcatttttaatgtatttatttttattttatgtgcattggtgttttgcccgcatgtatgtctgtgtgagggtgttggatccctggaactggagttacagacaattgtgagctaccatgtgggtgctgagaattgatcctgggttcctctggaagagcagcatccagtgctcttaactggggagccatctctccagccacaccactgaaggcatttttacatcacaagataaacacagtaacccctgctggaaatggtttaccttgtaactgttctcaagggcacaatgtttcatttggactgtcttgcgttagctcccttcctgtcacagatatccggacagcaagttccagaacaaagagttttggaggacgctttgaaacaaatatgtttgggtctgaaatgggggtcaggggaggcaaccccatttccagagttggcctgtcagtgaatgaaatcacacacgccagcttaccaaaaggatgcccatcacacccttaaatatacactacccaccacaggctacttttcagatccaatgcagataccacaatgacttgtggcttcagcttgcataggctcatgcttcattccaattcagtgtgattcaaccgattcaggatgaaaaccagttgcttttatgagctggccttgccacagggatggaggctggtatgcaggaagggaaggacccaggagcgaacagcctgaggtgaggggatgctagctttttctcagtgcctcccaagctgggaatttgtctcaggagcctgacgtgaagatccaaggcaaatgtgcagtgctcaagctatcactggtactctgctccgtgatacctaccctcgggggaccagaacacagaacagtgatacaggttcatctctaaagagctgccttcctgatgctggcctgaccgatatcaggttctggcctacacagcttgtctgtaatttgggcaaagctactggtcattcaggtgaacagagctcaacaccatctgagccctcccctccccgcccccacacctctgccagctcctggtggctgtgtgcaacagtcttgaccccagcaaagtgtctgggctgaggagggaagagcagaaagcttcttcctctagagggttctgtcccttcagagctctatgtggtgacccccaccccgcttgctcctcttccaaggatcctgaaagaagctgaacatggccgccctcctaggattttaggtcaagtccttagctggagccaggcaaggactgggcctggctcctttgcaaggctgactataactcctcccatctgctcttggcccttctgtccccacacctctccacagtgtctaccacacaaaaagaggcaagcagggaggcgggtgagctgggaaactcccgtcacccggctgccagctgagtataattagccccgctgctttcacagagacaacactgtgtgcctgccaaggccagtgctagctatctgtggcttgttggctgcttgcttctcagggcatttacgcctccaacctcccttcactaggaaaaaaaaagcaaaggctgggacagaaggttacagtaacagagacgcctggagcttgaggacaggccctagacctagtggaaatcttagggtggttctttcttcagagtccccctcagcccttctgccgcttcgccactcatagaagtgaacagtcaagcaggaagttgcgtgcacgtctacagccagcagctgcctttcctggcggagggttcttgtaacagaagcctcttgggctcttgggggctggtcactgggcctcagctgtcccagatgacaagcttcaagtggtttttgcttttgaggaaccgactgctcaagccctcatggacctctaactgactcgtgccccaggcctctgctgactacagctctatctattcctttcacacactccggcttccacccactgatttccatcctgggctttgtgtccaaggagatgttggttaaagcatcgttttgctccccgaacgacgctaggctgtgctgaaactttgaggggaggaaggacagccggaaaacatgaatcctggcttgacaatgaatatatgcactctgccctcccctgggaccctggacatcaagtagtacatctgcattgcaagtggacagttttctttcttcttaaagattgatttgtttatttgtatgtgcacgtgtgtgtgtctgaatgcgtttacctacaccgcatgcgttctggtagccggtggaggccagaaggcattggattgccctggagttttggagttataagtggttgtgagcaatttgatgtggttgctgggaactgaaccaaggtcctctgtaaaagcactaagtgctcttaaccactgagctgtttctccagcctctggacaaagcttcttgttcagcgggcagtggtggcacacgcctttaatcccagcacttgggaggcagaggcaggcggatttctgagttcgaggccagcctgctctacagagtgagttccaggacagccagagctacacagggagaccctatctcaaaaaacaaaacaacaaaacaaacaaacaaacagcttcttgtttctgctgaaggctctagttacccacacctgctagaggtgccggtttctccagatttcttagccacttctcgggcttccatctgttttcatccttgagtccctgagtgatgactctaagaccagtcccttctccactagcctttccaaactccttggagataaacattccttaaagttcatataaggtgccatcatgttcttgtcccaaacccagtgggatactacagtctcgacactccagtctcatgtcaaagcttttcccctttagcccaggttttctttgcaagcttgtcaccagctcctctccacactggccaatttatctttcagactgaccatctgtctacttatatttatcgcaaaccaaagcagatagagatgggacaaggacagagaacaaggaagcaattcatatgtccattgacagaccttgatatatatatagggtgactttgaacttcagaaagattttgagggattagggagctggctcagtgagtaaacatgcttgcttgtgcaagtctaatgagttcaattcaattcctggtaccaaggagacagcatgaacaactatctcaggtccagagagagcagttcacaacctgctgcccatcccccctcctctggctcttacattcttttcgccctttcttctgccatgctcttgggtctttgtgcaaaggagtgatgcagaaggcccctctatggctgagcactcatggtcacttattctgagcactttgattagttaccactctcgaccttaactgctgcccagatttgaaggagcctctctggccaaagctgagagcagtgtagctctatgttgcttcctttgctgtgatcaaacatcatgatcaggatggcctagttggtcatcaatgggaggacaggcccttggtcctgtgaggtttctacgccccagtaatgggaatgccagggccaggaagtgggagagggtagattggtgagtggaggggggagggtgtgtgcggaggggatagggggtttttggaggggaactaggaaaggggataaaatttgaaatgtaaatatagaaaatatctaataaaaacaaaacaacaacaaaaaagtcttgatcaagagcaacttgagcaggaagggttttcttttccctggcttccccttgcggggagagacttatgaggtcttatccttagctgaggagccaatggcagttgatgagggtgtggtctctggtagtgtgcttatactccagtggatgagcttatacccattcatttggttagcattggttggattcaatgaattataaaagaaaaaaaaatgaagatgggagggagacacatttggggagacttaaagggagttggagtttggggagtggttcatgaacgtaatcagaatatattctatttatgaaaattcaaataataaatgaaagattatatacataggtacatgtgcgttatatgtgtgtgcgtgtgtgtgtgcatgtgtaattttttttcttctgcctctgcctcccaaggccaagtgttagggttaaaggtatgtatcaccatgcctggctactgtcctattcttaagtggaaatctacccattttgtgagtacttaggaatctggtgcattaaggaaatatttgctaagtggaagacaatcttaattaagtttttcatattacaatttgtaaatgttgggctgtcaagatggttcagagggtaagagtactgactgctcttctgaaggtcctgagttcaaatcccagcaaccacatggtggctcacaaccacctgtaatgagatctgacggccccttctggtgcatctgaagacagctacagtgtacttatgtataataataaatacatcttttttaaaaattgtaaatgttgttcataagtgccactgtcttaaaagggtgtgacagatgggaagactgtagtgatgagaacttggggctgaggatcaggctctcattggctgtgtcgccttaggcaggaggagctatgtctcagagcttcagtactcccccgccccccaccccagatggggaggattctacccccatcttcatgtatcctgggaccaacacagccctgacacctcagccctgacagaccctccgggtactcagttcataggcactgctgttggttccagcggccagccggcctggcacccgatatggtttctatctctactgtgggcctgcttgattgcctcctgcctctgccctagccaaatgccatataaaaggtgtaaggacccatacagcaccacctgtaacagttctccttcctgtgtgtggtgctgccatgtgcacgtatggacttgggatgggctggtgagtctagccttcaggcagcctgggagggtacatgacgttgtgagcagatcaccagcccctggctgcatggagaagtgctcttaacctctggctgacttttgggattgctcagtgggcatttcagatcatcaaagatcagaggaagggaggaaagggaagcctattcatttcctcccgagccccgcccccactccccccacggtcgcccagactaggctctgaccccagaagggaggttactgcttccctcttctcgggattccatttagtaatgttagtgttgctacgatcaagctcatgccgttgcgcgcacgcacgcgcgcgtgtgcacacacacacatacacacattgcttccacacactcttccaactttgtaaacaatccctttgtaagacaggctatcgtagcctgcactgcttctcagtttcatgcagaacaaaaaatagattgtcctgggtcttatataggcttaccgcttctctctctctctctctttttttttccgaaacagggtttctctgtgtagtcctggctgttctggaactcactctgtagagcaggctggcctcgaactcagaaatccgcctgcctctgcctcccgagtgctgggattaaaggtgtgtgccaccatgcccggccgcttctcattattttaatttcatgttttgttttgttttgttttgttttgttttgtttttgttaagatctgagggactgggaagatggctcagtagagaaagggctgcacacgtctcaggacctgattttggattcccagcatccgtgtaaaattttaggcactgtggctgcccacatctgtactggaggtgcaataggtggatgccgagggctctctggcctgctaatctagctgaaactcaaacttccggttcagcgtgagactttgtgtcaaataagaatgtagaggataacccaacatcagcctctggcttcctcaattattccacaggccagtatgcccacacacatgtgaacacacacgcatccaccatatacatgaaccaaaagataaaaaataaaaatgggccagtaagatggctcagtggtaaagacacttgctttaactaacaaacagaaacaaaacaaaaatggaaaagaaaaacccaggcatagcaagcagctcattgtctctgacggcaaaactgggccaggggagaagggggctccatggagcttgtcttccagactttctagttaaaccagtgagcctcgggttcagtgagagactctaactcaagaaggaaggaggagccaaggtgctggtgcacgtctttaatccgaacactcagaaggcacaagcagatctcccggtccacagagtgaattccaggctggtcacccagggctgcacactgagatagtgacaacatttcagagtaaaaggaagaaagtgatcaaaaaagggacacctgcatgcatgttcacacgtgtgcagaaacatctgaatgcgcgcgcgcacacacacacacacacacacacacacacataatccacaaactatgttagtgttgtttgctacaatttattaagttatccaaattgcacttaatagttggccattggcaaccacaggttcttttaatccaatcttggtgtgtgtgtgtgtgtgtgtgtgtagggtcatggaggacagaggacgtcagcaagtataatcatttggtttttcctatgtccaccccagtttctgaataatgatatggaggcttatttatttgtgaatgaatgcctaggccttaagctagacttgttgctcaactagcttgtaactcaattgacccatttatactattctttgtctgccacgtgactggtaacctcgcctccgttttatatatctgacttcctctgagtttcaatgaatctccgaagcctctcttcttcccagagtcccttctctgctggaagtcccacgttacaatcctgccttttgctataggccataggcttattttaactaattagaaggtgccttgggcagagaagaacagagacacatcttcactcagtgtacagaaacatcaaatggctcgttctattcttctctgatgcctttgagacagggtctctttctcaagctacctggatctaggctggtggccaagaaactccaatgacattcatatctccagctcccacggcaccagggttagcaatgcccacatgaggctttttccctgggtactgtggaccagcagctttgtgtacctgcctccattccttccctgctctgacaggcagtagctatgagctaaaacaaacccttccttccttaagctgtgcttgccagatgttttacgacagcaatgagaaaggcaacttccatccacaactagtatggagaggtagcgccattgctacagtaggtctgactaggtggttagatctttaaatcttaagaactggcttacaggcaaaatacggaagagtttggaattttgagctagagaagccctgtgctgttataagcagagcttagtgagccattctgataaagttctgcagaaatgttgagagaaatgcagagagcagaggcctcgttcatgaaatttaaacaggaaacaagaactctcttgggaactgacctagagggtactcatgttttattttggtaaagaatctggctgcattcagctcttgtcctgaaaccttgagtgaaactgaattcaaaagtcgtgactcctctgtctgacagagagaatttcgaagcagtgtggcattcatgccacagcatggtcactactcctattcagatctacagtgagagaggaggaaggtagaaaaatgtgaagtatgtcgggaaaaggaataatttaaagttacagacaaagcagctctaattgttatagggattatagtagcattagaaaccttgtggggctggagagatgctcagtgggtaagaatacttactgttcttctagagacccaggttcagttcccactacaactgactcacgactactggtagctccagttccagggaatctgatgtcttcttttgggttccatggacattcagatacatgtatacagaaatatacacatatacacacagctaaaaataaaacgagagagagagagagagaatcttcttactgcgctgctgtacactgagaacacaggaaagatgccctaaaggcaagaccccacatatcacagtgtctgtcttgtgaaaatgcaaagtattttaaagaagagaaccctaacatatactgcagctgaaggggcaccctgctaacacacacacatacacacacacacacacacacacacacacacacacacacacacacacacacacatcacacacacacactgcccagacacacagagaccactgtagctatggtccaaggagatcagtttgtattttgagctggcagtgggacttggcagtgccatccatagggtactaattttaattgtgaaaaatgtaagatgggaggggtcatggagtctgacaccaaggttccagagagctgatgaggcccggcaaaatgtgtcagaatcagcatccctgcagggaaatggtgagtggctgctgtgtgaagctttgatgtaaagacagtccaagttgcagtggggatcccaggctgtgagggatggagtgtttgctagagacgattgcagacagacagacagacagtagtaccagtccaggagaggaagcacattgcttcaggaggcagctggaggatcccactaggagccccggtcacatgtggagttgcattcttggatgttttccctggaatatttcagactttgcttggatctttctttgctgtgcgtctgtttctccttttttggaatgagaatgttttctcttaacatacatcatcgtatgttaaatgtatgtaacctgtcagatattttgttataacagtgagaaaagtaacctatataagcacagaatttagcatttcaggttgattgtatgtttgttggcagagtctcatgtatttaacctcaatgtagccaagggtgaacttgtctcttacttgccttgtctccatatcctggacacagggagttctccaccccagctccattttggtttaaataattattttaaaggtttatttatttattatgtattctgtagctgccttcagaagaatatattggatcccattacagatggttatgagccactgagaattgaactcaggacctctggaagatcagtcagtgctcttaacctctgagc

SEQ ID NO: 1531 - DNA, 488 bp, Mus musculus
cgggagggggcttgggtccctggtgtgtgtgctacggggtgcagactgtgtttaaaatagcaggaacgccatgtcccggggttccagcgccggttttgaccgtcacattactatcttctctcccgagggccgactctaccaagtagaatatgcttttaaggctattaaccagggtggacttacatctgttgctgtcagaggaaaggactgtgcagttattgtcacacagaagaaagtacccgacaaactactggattccagcacagtgactcacttgttcaagataacggaaagcattggctgtgtgatgacaggaatgacagctgacagcagatcccaggtacagagggcacgctatgaggcagctaattggaaatacaagtatggctatgaaattcctgtggacatgctgtgcaaaagaattgctgatatttctcaagtctacacacagaacgctgaaatgaggccactcgttgtgtatgaattct

SEQ ID NO: 1532 - protein, 145 aa, Mus musculus
  VARIANT (1)...(145): Xaa = Any Amino Acid
NSRNAMSRGSSAGFDRHITIFSPEGRLYQVEYAFKAINQGGLTSVAVRGKDCAVIVTQKKVPDKLLDSSTVTHLFKITESIGCVMTGMTADSRSQVQRARYEAANWKYKYGYEIPVDMLCKRIADISQVYTQNAEMRPLVVYEFX

SEQ ID NO: 1533 - DNA, 917 bp, Mus musculus
ttaaaatagcaggaacgccatgtcccggggttccagcgccggttttgaccgtcacattactatcttctctcccgagggccgactctaccaagtagaatatgcttttaaggctattaaccagggtggacttacatctgttgctgtcagaggaaaggactgtgcagttattgtcacacagaagaaagtacccgacaaactactggattccagcacagtgactcacttgttcaagataacggaaagcattggctgtgtgatgacaggaatgacagctgacagcagatcccaggtacagagggcacgctatgaggcagctaattggaaatacaagtatggctatgaaattcctgtggacatgctgtgcaaaagaattgctgatatttctcaagtctacacacagaacgctgaaatgaggccactcggttgttgtatgattttaatcggtatcgatgaagagcaaggccctcaagtgtacaagtgtgatcctgcaggttactactgtggctttaaagccacggcggcaggagttaaacaaacagagtcaaccagcttccttgaaaagaaagtgaagaagaaatttgattggacatttgaacagacagtggaaactgcaattacatgcctgtctactgttctgtcgattgacttcaaaccttcagaaatagaagttggagtagttacagttgaaaatcctaaattcaggattcttactgaagcagagattgacgctcaccttgttgctctagcagagagagactgaacactcttatcagcttaccagatccttgatgcctgtgcctatgtgtttggtaacaacaaactgacatcatagaggccctggattgaagatggagactctcccactcctcctgccactgactggttaggactctgtataaataaaacagtgcttttgg

SEQ ID NO: 1534 - protein, 249 aa, Mus musculus
NSRNAMSRGSSAGFDRHITIFSPEGRLYQVEYAFKAINQGGLTSVAVRGKDCAVIVTQKKVPDKLLDSSTVTHLFKITESIGCVMTGMTADSRSQVQRARYEAANWKYKYGYEIPVDMLCKRIADISQVYTQNAEMRPLGCCMILIGIDEEQGPQVYKCDPAGYYCGFKATAAGVKQTESTSFLEKKVKKKFDWTFEQTVETAITCLSTVLSIDFKPSEIEVGVVTVENPKFRILTEAEIDAHLVAERD

SEQ ID NO: 1535 - DNA, 59863 bp, Homo sapiens
gcttgcagtgagccgagatcgcgccactgcactccagcctgggcaacagtgcgaggctccatctcaaaaaaaaaaggagcccaaaggagccctgaggcaggcataagcttggcatgtgtttgaggaaagcaacacggccagttgggctataatagcaagagggaaagtaataagctctgagattagagagaaggcagaaaccgcaatgcagaggaccttgcagatcctggtagacaagcaagaggcctagattttattctaaatgtagggagaaaattgctgttgagctgcagcttcccaggaagccaaaggaaccatggtaaacatggtcagtaacaaaacctacagtaagccagccacagtggctcatgtctataatcccagcactttgggaagccaaggcaggcagatcactcaagatcaggagtttgagaccagcctggccaacatagtgaaccccatctctactaaaaatacgattagccagatgtggtggcacacgccttgtagtcccaggtactcgggaggctgaggcagcagaatcacttgaacctggaaagccgaggttgcagtgagccaagatcgtgccactgcactccagcctgggttacggagtgagactgtctcaaaaaaaaaaaaaaaaaaaaacaacccacaaacctacagtagccataaagtaagaagaaaatagctaattaggaggagtacagatccgcaacagcacatatgaactcaatgcactgttgtgcattgaggttttcatattgtttgtgctaacaaaagtttatttccaactttgcttaatgagtgtatatgcctcagccccaaatctaggtttcatagtctgaatgtgataacttcaagatttgtcagtattctccaaatcatttattttattgagacggagtctcactgggtcacccaggctggagtacagtggcacaatctttgctcatggcaacctccacctcccgggttcaagcgattctcctgcctcagcctcccaagtagttgggattacaggcacccgccaccatgcccaactaatttttgtatttttagtggagatggggtttcaccatgttggccaggctggtctcgaactcctgacctcatgatccacccacctcagcctcccaaagtgctaggattacaggcatgagccacctcgcctggcccccaaatcatttattatttaaaaagtacagtagctctcaatcataaagcaagggagaagcaaacctctcatccagttcccaaaccacatcccttctttttttagctggaagatggtgcttccatttctccaagagcagaagacctaatggcaacattgggtagacagtaagattgtaggcttgggaattagtttacccaggttgagatcatggccctgccactccctgtctgggaaaggtttttcctttctctctgtcttccttatctcttgtgtaacttttatggggttgttttaaggattaaataagataatatgtgtaaataactcatgtaaaactcttggcatagcaccaagtacatggaaaacatatatgttagttgctgtcatgatcattattattttccttatatggaaaaattagataaatttgaagtgttatgaccaagaagcctgttggaaagtggtctcactgcttggtttggggtctgtatttattgcatcagctgaaattccaaactcagttgtaacgatcaattcactgaccttctttgtcgctttggatttgaatatttaagtgtttaacattaaatctgttttccactaatgtgccaaagaagcttttcaaacatacactagagagaataatatagtgaatagtgagtcctcatgtaactgtcacccggctccaacaattaccatcattttgctaattttgttccataaaccgaatacattttttctttttcttttttttctggagagttataaggcaaattttgtcattttatcatttcacttgaaatacttcaggataaagaaaactttaaatggtcctatttagggtcatttgaatcaaggcatagggcatatcacaagttgctgtctgaatctcctaaagcaaggtcgttactgccatttttacagcacatttattaaaataataagtgctaaggttgatggtctgttggaggctttgagtcactggctcttaccaaagaagatgttttggggtgctgatccaggtgactgtctagaagctgctctgaaataccagttcagctttaggggcagccagttatttggtggcttgcaagaaagtctcatcctgccctagtagtattttgggtgtttcttgaatttgggtgaagagagagggaaaaggtgtgctctgtgatagataaggcaaataggaaaaatgcccaaagagaagcaacttttaagtgtgaagagagcattgttagaattcatcgttctagtggaagagtccagtgagctgtgagaatcccaggcattagcattctgttcccctcagctttccatctgtgttctagatagtattgcttaccagctaaggactttgaggtggttcttaagtattactagcatcatgttggtcaagaaatcagaggcacctccaaggaaagtaagtaaaaagtacggtgaaaaacactgtcctctgcctcttcagctgtgcttgattgtgtcctttcttatgcctggttcagctcggaggatgatccattccttctgtatgccacactgcactccgggaatcactgcaggtttatcacaagagacctgatgcgggaccacaaggcctgtctgcctgatgccaagacccaacgcctgttttttaagtggcagcagggacatcagctggcaattgtaaataggtttccaggatcaaaactaacctttcaggtaatggtacctgttctttatgtaatattaacagagtcaagtatacagtaagaatgtggcatagaaaaagagtgtcacaactaattgaaggttgcaaatgctttatttttctcagttttaggttagtatttggaactagccaggtcctagaaagagtctgctagagttttcataggccaacctcaaattaattaaaacacttaggggccaggcgcagtggctcacacctgtaatcccagcactttgggaggccgaggtgggcaaatcatgaggtcaggagatcgagaccatcctggctaacacggtgaaaccccgtctctactaaaagtacaaaaaaaaaattagccaggcgtggtggcgggtgcctgtaatcccagctacttgggaggctgaggcaggagaatgtcatgaaccctggagacagagcttgcagtgagccgagatcacgccactgcactccagcctgggcgacagagcaagactccgtctcaaaaacaaaaaacaacatttaggatataccagttttgacttcaattaattatgtcacaaattatgacttcttttttttttttttttttttgagacggaatctcactctgtcgcccaggctggagtgcagtggtgcaatctcagctcactacagcctccgcctcccaggttcaagcgatcctcctgcctcagcctcccaagtagctgggactatgggcacatgccaccacgccgagctaatttttgtatttttagtagaggtggggtttcaccatgttggtcaggctggtcttgaactcctgagctcataatccacccacctcagcctcccaaagtgctgggattacaggcgtgagccaccatacccggccataaattataacttcttacatgtgttttttatttttgtttatttgcaatagctcaaattctttatttcttatagtttgttatacttctgctaagtaatttgttttccctgtttaattcatttctatgacagtctcaattgaattctcctttgattctagttaagatatctataatataaggacacatcttgtgtgaaagcaaagggagagaatccaaagtgagttattacagaaaagtacactggcccgtggtataataaataaggttcaattatcaaaaaatattggctgggcgtgatggctcacacctgtaatctcaacactttgggaggccaaggcaggtggatcacttgagggcaggagttgaagaccagcctagccaacatagcgaaaacctcatctctactaaaaatacaaaaattagccaggcgtggtggcgtgtgcctataatcccagctacgtgggaggctaaggtacaagaatcgcttgaacctgggaggcaaaggtttcagtgagccaagattgtgccactgctatccagcctgggtgacagagcgagactccgtctcaaaaaaaacaaaaaaaaacaacaaaaaaaaaacggagatgttggtcaaaggagaaaaaatttcagttagataagaggaatacgttccatgatgactgtagttaataataacaatgtgttgtatcattgaaaattgctaagagtagattttaaatgttctcaccacaaaaattgtaagtatataaggtaatgctcatgttaatgagctcaatttagctattctacaatgtatgcatatttcaaaaacatgctatacatgataaatatgtataattgttattcgtcaatttaaaaataagtaagaaaggctgggtgcagtggctcacttgtgtaatcccagcactttgggaggccgaagcaggaggattgcctgagcctaggagtttaagactagcctgggcaacatggtaagaccatgtctctataaaagtaagtaaataagaatatccaaaacaataaatttatagtaaatgtggtattaaatgataccatagtgattcaagatatagttgaagaactattaattcttaagtataataaaggtataaaggtattgatcttacatttataaaataagaccttatttcttagagatacatactgaagtattacagaagaaattacatatctgagatgggagggcagcgtatggatgaaataagactagagatgaattgataatggctgaagctaggtgatgagtacatgagagttcattatagcatttctctacttttgtttacatttgtcccttggtatccatgaggaattggtttcaggacctctcacagatactaaaatcctcaaatgctcaagtcccttatataaaatggcatagtatttgcatataacctacacacatcctcctgtgtactttgaatcatctagattatttataatacctaatacaatgtaaatgctatataaatagttgtttctgtatcttttagggaataatgccaagaagaaaaaaagtctgtacatgttcagaacacagttttttgttgttgttgttgttttgttttgtttcgttttgttttcatatattttcaatctgtggttgtttgccagggatacagaacctgcagttgtggaaggctgactggatttgaaatttttcactctcacacacaaaactgatagagccaacaaaagaacgtctgtattacataaatgtaatgcttctacagagagtctttagacttaaaaatgagacccctcaaaaaaaggaactcctaatattagggctcatcttcacagagtttgctgctgtttgaaaatccattattaagtgagataatccattatcaatactcttctggagcaaacttgagaagtgtcagaaagagaaatggccaagtagccctttagtgttgttctcaatgttttgttctctttttaattcaacagcgtattctcagctatgacacagtggtgcaaacaactggagactcgtggcacataccatatgatgaagacttggtagaaagatgttcctgtgaagtaccaaccaaatggctttgcctccaccaaaagacatagagattcttacctctatgctaagtttgtgtttgggtaccctctaggttggcatcagaggctcttgagctggtgtttgtttagggcattgcctctgtcctgaagataaaaggattctattaacagcattgacattgattttttaatgaaatgagatatatcttttcataaccagctgcgtttttttcccctaacatttgtttttggaggcttatcaagagttggagaacttagtgtagagcaaaacctgcatttctcctactgggccagctattccacttagcttgggtgactaatagtgcttttggtatccattttttgctacttctgaccttgccttccaggcctaccaatagcagaatcaatccatctgtccctgagatactcatgttgtttcaaatgcctcctcccatttctggcatagtctcattctctgtatgttatgccctatccacatggaatcatttatcgtcctctgtaataaactggccaagatactaaaggcttactattcatagcagtttttaattacttatcatccaattatttggattggagaagagggggcattcactcctctttttcttattttttttggaaatagagtctcaacttactctgtcgccagggctggagtgcagtgacgtgatcacagttcactgcagcctcaaactcccaggctcaagcaatcttcctacctcagccctcctgagtaattgggactacaggcatgtatcaccaggcttggctaatttttttttttttttttgtagagatggctgtctcactctgttgacaagactagtctccaacccctggcctcagtcgatccccagcaatttgggagattgaagcgagagaatcacttgagtctaggagttcaagaccagcctaggcaacatagtaagatctcatttctacaaaaaatttaaaaattagccaggcatggtagtttgcacacatagtcccagctactttgggggctgaggtaggaggattgcttgagcctcagaggtcaaggctgcaatgagccaacgttgcaccactgcactctagcctgggtgacagagcgagaccttgtctcaaaacaaaacaaagtgctggaattgcagacttgagccacagtgcccagcctcacttctctagactatgatggttttttcttcattctataatctcttttccaaattggttcaacattttgtgaacactattaatttcatcattcagtatatgtgggctttctaaaatatgccaatttttttccacttaatcaagtttgacttaatttaacaaagtgattatattttaatagttacatttctgttttttccactcactagccagcttacagtttattagcccttgatttcagctgaaaatattcatgtctgcaccccttcatgatagttctttctttacgtatacatactgtattcaatatgcaagaacaggcaaaaactactctattgtgataaaaatcagaatagtaattgcctgaggaaagggatatgagagaacttgagagaactttctcggggtgatggaaagtttcttatattgatttgggtaatagtaacatagctatatgtatatattagttaaaattcctcacactaaacattttaaattgatatatttacatttatgacaatatacctcaaagtaagttagggtaagaaaagataattacttacatgaaataaacaatgacctcttttatatcaaaccatatacatgtgtataattagggtatgtattatgcacagagaaacaatttaggaaaatccaaggaggggacgttttatcttcttacctatttactgaatgcaacattactgcacaccaagacaaaagagctctccaggaaaacattggatatattgagagcattaaaagatactgcaaaagctctaataaattcagtctgcttattttccaaatttcataaactacatacttaggaaactgtgctttcagtgagctaaacttctttttttaagtaactatcatagttttaagaaaaacattttaagaagacaaaaagtatttattaagcccatctaaaaggctaatgcaaattcccaaaaaaggagcacatagagatagaggaggaggccgaagtggtggctcatacctgttaattccagcactttgggaggccaagacaggaggatcactttaggcccagagttggagaccaacctgggcaacatagcaagaccctgtctcttaaaaaaaaaaaaaaagacgggagaagctacaagaagaaaactagaactttagagcaggagtaaccttagagcatgtaaagtccattttggagatgaggaacagacccaggaagatgacctggcttccctgaatcccacggctagttagtgcagacatttcagccataacccagctcttctaattcccaaatactctttcttctactggcacatagagatgggggaggagtcagggcatggtggcccacacctacagttccagcactttgggaggccaaatgggagaattgcttgaagccaggagttggagaccagcctaggcaacacagggagacccgtgtcgacaaaaaatttaaaaattagctgggcatggtagcacatgcctgtggtcccagctactcagaaggctgaggtgggaggatcacttgagccccagaggtcaaggctacagtgagctatgatcatgctactacactccagcctaggtgacagagtgagaccctgtctcaaagggagggaggtaagaatgagaagaaggaacaggggtgtacctcttttaagggcccaagtatcctgaatggctcagcagtatagaacattgtggtagagaaattacattttaaaataactctaatactgtttagaaacaaaaccctaacttctgcttgagataaactgaagtgcatctgtcccttgtccaggagtggggaaccattgtagggttgctcagcataagtcatactgccacggtgaccttgaggagtgcagggattccctgaaggaagcagctggtaccagacacttaggctgcccatttgtgttctgatcatttgagtgaaaaaaaggtacctgtcaagcaagctcctggacaccacaagaaggaggaattattttaaaagctgtactcttaaattgttagtatctttaaaatcagttgtgaacaatgaaggatttgaaagagcattgactttgccacttaaaagtatttctaaaatactttgtgcttcccccttgcattctgaatttatacacttttcctcctgctgttctcagacccagtggaaagaaaatctcaaggaagaaggctgagtttattctctcagggctctgttgggtctacctcatctgaggtggcttattcttcataggaaattaatttttcttctcaagtatgcacttaaatataattactgcttccttggtcctctagcagatttctcacttttatttatttttttttttgagacagagtcttgatcttttttcatctaggctggagtgcaatggtttgatctcagttcactgcaacctctgcctcctgggttcaagcaattctcatgcctctgcctctcgggcagctggaattacaggcatgcgccatgacgcctggctaatttttgcatttttagtagagacgggttttcaccatgttgccccggttgctctcaaactcctgacctcaggtgatccacccacctcagcctcccaaagtgctgggattacaggtgtgagtcaccccgcacagcctgaaatgaggcatctctatctatagtccagcagccctacaggaggcaggaggggagcaagaataagaaaggaaatttgtaaaaggcacttaggagtgagcagaaaggaaataggaccagcttttacctgcccagtcctggccagtgacaagcagtctgcttgagtctgtgctaaataaacaaaggaagttccatttagagctctacagaggggaagccatagaaattaacaggatgaaaatacaagagacaggaacacagatgaataaatgtaataaaatttgagaaataatctttacttttatcatctccatttatgctttttcatgatgtcctgacgttccctctccccaagtttagttttttgtttttgtgggtttttttggcattatttgatctgacgagtgcttccagaggttctactacatacacaacttgcttttaactggtaatggaaataaacaggaagacaattatctagtcactgatggcagctaaaaattattttgctaccagagtgccctcagaagtatactcttatctaatggatcgagttattatgataactgtggtaatttgttgttataaatagcagtaacataggaaggttttggtaacttctgacaagaaatttgatgtagagagttaatttcgagcacattaaaatgactgtcccactcatctcttcagtgctatttaaaagccagcccaagaagcaaatacttgagaaatcaatagtaggggctttaattttgaatatgatagacattaattcattttaatgagaccaggtcagattgcctcatcactctcagatggactagaacattatatagataccaagttcagttcacatctaaatatttaaagtctactattaaaagaggtttcctggccgggtgcagtgactcatgtctgtaatcccagcactttgggaggccgaggcgggaggatcacctgaggtcaagagattgattgagaccatcctggccaacatggtgaaaccccgtctctactaaaaatacaaaaattagctgggcatggtggtgtgcgcctgtagtcccagctactcgggaggctgaggcaggagaattgcttgaacccgggaggcggaggttgcagtgagctgagattgcaccactgtactccagcctgatgacagagcgagattccatctcaaaaataaataaataaataaggtttcttgtgctttctatgactgcatcagaacagagaatgtcagtatccaataggatgccagtggaattccctgacgattccatccatgcggctctgctggagcagggtagtgtcctaggctgggagaatgggatggagcctccacctcatgaagtagcttcctttggaggtggctatggcaggtcttcggagaggtaagtccctcactcagacttgttgcttgagatgtactatattactgattctttgaaaataaatcattcttatattttattcctctttacaatgaccttgctctagaatcccaagttgcttttttttctatcctgtgttccatggctgagcagtctattgctattaagttgttgtacgtatatatttttctatgcatatatactcattttttgtttttctatacatatatacttattctctaggaactctttcgtaacatgtttttttcacctgacagaaaatgaaaaattttccctgttcttacagtcacttcttcctcatgtattcttttttgtgtgtgtgtttgagatggagtttcgctcttctcgcccaggctggagtgcagtggcgcgatctcggctcactgcaacctccgcctccctggttcaagcaattctcctgcttcagcctcctgagtagctgggattacaggcatgtgccactatgcccggctaattttgtatttttagtagagacagggtttctccatgttggtcaggctagtctcgaactccagacctcaggtgatccgcccacctcgacctcccaaagtgctgggattacaggcatgagccactgcactcggcctcatgtattctaataattaataatgtaaattcataaaaaggggcagccagcttaaactacagcattgctggacaccataaaatagtatttgcatagctgtatactcacaaactgctactcaaggcttgctttgttcagaaggaaatctgtgttcacagaagctgaaccctgataatagctgttggctcaaattaagggtcacgtcctttggcacttagcgctattctggcaggagtggtcaaatccttgatgtaatgggtcttttctaagtcaggccctctgatctccaactcctaaagaaataaactctggtcaggccatgtttttgaagagaacgtctaaggaacaattgctgctttacacagataaagagctttttactgcttaaagcaaatcatgtaactctttgttcatcaacacaccaagggaagtttctgtgaggaaatcagtattgaatagtttgtactttatacatgttataagaatgtacttttcgggccgggcgtggtggctcacgcctgtaatcccagcactttgggaggccgaggcgggcggatcacgaggtcaggagatcgagaccatcctggctaacacggtgaaaccccgtctctactaaaaacacaaaaaaattagccaggcgtggtggcaggtgcctgtaatcccagctactcgggaggctgaggcaggagaatggcgtgaaccagggaggcggagcttgcagtgagccgagatcgcgccactacactccagctccagcctgggcgacagagcaagactccgtctcaaaaaaaaaaaaaagaatgtatttttcggcctggcgcaatggctcacgcctgtaatcccagcactttgggaggccgaggcaggtggatcacctgaggtcaggagttcgagaccaggctggccaacatggcaaaaccctgtctctactaaaaatacaacaacaacaaaaatgtatttttcttccactcccattgccagtatcaccagagattccaactccatccacattttggtctcattgtttcttttttttttttttttctttttcttgagatggagtctcactctatcacccaggctggagctcagtggcgtcaatttggctcactgcaacctccacctcccggattcaagtgattctcatgcctcagcctcccaagtagctgggattacaggcacgtgccaccatgcccacctaatttttgtatgtttagtagagacagggtttcgtcatgttggccaagctggtcttaaactcctgacctcaagtgatcagcccaccttggcctcccaaagtgctgggattacaggcatgagccaccacacccagcctggtctcattgtttcttaactctggtctcatgatttgttgttgttgtttgttttcgaaatggggtctcactgtgttgcccaggctggagtgcagtagctattcacagtggtcatagctcactgcagcctcaaactcctgggctcaagcgatcctcctgcctcagcctcccaagtagccgggattacaggcatgcaccaccacacatacctgattttgtgacttttggctccctatgagatggccaacctttttgattagtttcaggattttaaactttcaagttcctcattttgtccacaacctccttacctgccccactcctttaacccaaccaccactgggttaaaccaccattgacctgttcttagacctatcccttcctcacccaggaagcctctattgacctttcccatctgactttgcttgcctttctccctaccctgcctctcaaagcattcatgggagggatggcttcaatagcagtgcaaattctttcatactttttacctcctttggtctccatcttttcagttctaaaccttattttgagtagccacaaaccattccactttctccactcctgtataccatagtattgctagaaaagtcatgaaattcccattaatttcctgaaagagctctcccaacctttgcagtcttaactctgcaaaggtaagttgcaagcagctaatctcctggagccttcatttccttttctgttaagtggggaagatgggccatcacagtgcttctcaaacttaataggcatagaatcacctggggatcccactcaaaatgccagttctgattcaggtctgacataccccgtgatgccaatgctgcagactgtaatttgagaagtaagggcctcagtgagctccacaattatataaaaaatagtaacaaaacaacacctgtgagtccaagtcctgagtcagtctcatcattctcacactcagcagacttaactggaaactaaaagccatctgttatgaacctcttcatcaatgtttgccttttccaataattttcctctcctgaatcttttctcccttttcttccctaggttacttaaaaagaaatttttttttaaattataaaatagagacaggatcaggttggtcttgaactctttgcctctatcagtcctcttgccttggcctctcaaggtgctaggattacaggcatcagccactactcctggccctaggttactttttctacctacatccacgctgttccttctttctgaattgggatcttgttctcagttaatccctttcctccagctctttcccatttacttacaaatacctttaggctctgactggacaaaactgtgctttcccagggatagtttcatagcaacattctcaaaagaaggcaccatctctgccattggtttctttccaattccacatttgcagctgaccaacttcacctgagacactcaaactgaaccactttgaaaacagcttattcataatagtgtaattgacaataatgaaattggaagtaactattcaaaataagggaagaagtaaataactgtaatttaattttttattttttgagacagggtcctgctgtcacccaggctgatgtgcagcagtgtgatcatgactcactgcagccttgacctcctggactcaagcaatcctcctgcctcagcctcctgagtagctggtactactggcgcactctaccacccccagataattttctaacttatttgtaaattaaaaaaaaatttttttttttacagacagggtctcactatgtttcccaggctggtcctgaactcctggcctcaagcaatccacttatctcggccttccaaagcgctgggattacaggatgagccattgcacctaacctaaacgtaacttttaacgttgcaatgattaaaatgatactttgcactttgggaggtcaaggcaggaggatttcttgcatctaggagctcaagaccagcctgggaagcatggtgagattccccccatctctacaaaaaagacaaaaattagctgggcacggtggcatgtgcctgtcgtctcagctactcaggaggttgaggtaggaggattgcttgagcctgggaggcacaggttgcagtgagccaagatcgagccactgcactccagcctgggcaacagagtgagacccacacagcctgggcaacagagtgagaccccacagggtcaggctggagtgcaaaggaaagatctcagctcactgcaacctctgcctcctgggctcaagcggttctcctgcctcagcctcctgagtagctgggactacaggcgtgcaccaccacacccagctaattttttgtattttttagtggagtcagggtttcaccatgttggccaggctggtgtcaaactcctgacctcaggtgttcactcaccttggcctcccaaagtgctgggattacaggcgtgagccaccgtgccccaccgatactttgtacattggcatagaatcaatgaaaaagcagctccaaaatagtatgtctagtaagatcccattttttaaatgaaggaaagaaaatacttggctggtcaggtgtggtggctcacacctgtaatcctaacacttcgggaggctgaggtgggagaatcttttgagcccaggagtacgagaccagcctgggcaacacagggagaccctatctctacaaaaaaaaaaaaaaagagagagaaagagaaaaaatacttggaggaaaatgtctggaaggaataacatttcattgattccacaatgtcaataggtatctctggatgttgggttgtggatgatttttacttcatcttcttcacagtctaaaatttttgcaataggtgtaataggatgttagactagaactctttttttttttttttttttaggagatggggtctcactctgttgcccaggctggagtgccgtgatgcaatcatagctcactgcagcctcgacctcctgggctcaagcaattatcctgcctcagcctcccaagtaactgggaccgctggcacacaccctataaggtggacaccaccacacctggttaatttattttttgtagataaagggttttgccatgttgcccaagctggtctcaaactcctgggctcaagcaatcctcccaactcggcctcccaaagtgctaggattatagataggcatgagccaccatgtccagcctttacaaattttttgcagataatctcttctttccattcctattgctgcttaccccagttcaggccttcaaaaactttcacttggtctattatcaatagcctcctggctgatgtccccaatgacagttcctcataaatacagctacaaggtttatcttcccaaagcataattctagtcttgccactctccttgctcaaaaacattaaatgtctccccgtagccttccaactagatagagcataaattccttagcttagtatccaaggccagctcctttcatttgtaccctaatccaaaacattttttgagtcatacttaggttaggctattgcctagcttgccctaaacacaggatcttttttcttcctctgcttgtttatgccactcccattccatgttgcattgtggtgcctcccatattgctcctaacattgctcttaacacacctgttaagagttctccctgttctaagctgagcttggacatgcatcttccaacaggtagtcttacattccctttggcccgtgagcatataaggtcattttctcatctgtgctgctctgttacacatttccttgtgtattacggactacctcatgttagctttgctttcattcatgtttcatctccatggaactctggtggggacgctgtcgggttcatctgtgtgtctcccagagcagctagcccagcttcttgcccaaagagggagctcagtaaatgttgaattactttggagaatttgtttgaaaatatcttcctgatttttacctctaatgcctacttctcctttaagtgaatacccctcttgctccttggtcttttgtgtgtgagctggctaagtgggaacttaatctgtggtgtctgatgcctcactgatcctcaaaaaaacagtaacttctcagtgccatcctctataatcatatgatatcttcagtgaattaaaggtttattcattagacatctactctgtacttggtactgtggtaactgggataaaacttgctatgtacttgtaagacatcatcccagagtttttaatctttggaatgtttcagtgcctaaatctgctgtctgtggttgatttttggaacttgcctttgtttcaccattatggatgaaatacatttagagtgaagtttgaggatctcagctgaggttcatcaagtcattcaaaagcaagtagaaaataaaactggagtcaggtgcgatgactgtaatcccagcactttgggaggccgaggcaggaggatcacttaagcccaggagttcaagaccagcctgggcaatatagtgagacattatctctacaaaaaacttaaaaatcagccaagcatggtggtgcatgcctgtagtcccagctacttgggaggctgaagtgggaggatcgcctgggaggcagaggttgcagtgagccaagatcgtgccactgcactctagccagagtgacagagcaaaactctatctcaaaaaaaacaaaaaacaaaaaaaaaaaaaccgtagcacactcttgcttttctatcaataactggactctcaagaactggtttctaaattagtgactgaaaatattggtcaaaatgatcagaaacctcattcatttgcattttctctctccctctctccaattaccctcaagagaatttggttcattctgagcatcacagatgacttaattttgtggtaagaaaataggaattagagtcagccaattaggaaacctcaaggaagaggaagtgtctctaggctaaagggaaggctgttgagtcttatttcctctctgttcttgactcactttcttagtgactggccaatctctgcacctccctttccccaccttcagggagctgagggtgggggtggggaatagagtgaataaagtctaaataaagttcataaagatcccaagatgtagggaggtaccatgaaataattgatcttgcagttccatcccccatcaacattcatgggtgaaggctgcatgtgtgtgtgacacgataggtaagaattagctgctttccaaattaagacagagtgagtttcacttctgaataatagcagtgtgcagtgcaggcccatgcagtacctatttggtttcattctttactagggatagatcaaagcgaaatagccaacaattcaggccttattcatcagtgcgccccctcctttcacaaagaagctgagttccagtcaaatagtaggtggcttaatttcaccgtagtggacttctatgccttttaaagtgggtacagcatactcacctgtttgagagaagaagaaactgagattatggtcaccaagtaatctgtggcaaggctcagattcaaacccagtgctgctgacactcagagcagaacctgaccattttcaaagttcacaatatgaccgttcgcttctcccacccttccccatcttatttttcactggaacatttgctgttctctcaagctatgaagggcttcctgtgttaacatgcctaaggggaagctgtatgttaaaaaccaccaacggttaagcccaagccagctggggtcttccgttgtttcttccagtattgtggggagacccatgagaattctcagtgtttttcaaagtccttggcttccagaaacaagaagctgagcatcgggttttcatttaagacagagcttggaaaaacaagaaatatcaaaagccgtaagaggataatactgaagttattatagctaaaaaacaagggtgaactgaaaagctaaaggttttggctctatagaggggttcatgtatagttgtatttaaatgtcctttgggttgaagtgatacaagtttattccctctcaaaccaaaggacagcatttattctggggaatggctgagataatccaggcccagaaccacactgactggttagtaaggggatggcacagaagggaaatgatagttgtgtgacttctatgttgctaaacactgtattgcatccaccattggttccagagggtagaagaaccacactagatgttacagacaagggggcagaggagggttgctttattggaatctggggtttgaagggcttatgagaagcataacctcatgtaagttgcctcatgtaagtcacagaagtcacaccccaaaccacatttggtgctccatttgtccgtttcctttacccataaattatagaactagagtagagaaagtacccttttctcctcctccaacactcatccagaatgactgaagtcctaggtagccaaccatagctactggggtgcaagaagaactgaaggatctgagaaagacaaaaaagggaaagatacagagccaggttcttgtcctcagggaggaagctctgaattagtgaaaatctggccagagagctgggcagagtcctacgtccctttctttacccagaactgctacatccctagctctgtccttattacagctgtcctttggggccccttaacatcaggatactcctctaagatgctgtattgcaagtggccaactcacagggcactgtgtttcaacccctgctaatatcatatggaaacacaaataggcttctttttttttattccctggctcactgaaactgccggcagagcaccttaagctaagggctacattcttatcttgcctttaaacaccatgtgattcagcatgtctgcagtctctgggaatctacactgccactttctacctttgccttgtgggtaacccttaccttccacctacctccacccccaggggagaatgtgggccttgccaaacggaggcccccaggagattttccaagactcacgagatgtcaagtcatctctaaattttttcaaaaaaccagaaagtcatttcaaaaagtctaacttgatggccccacagagaggaagatcaaactttccacacagacacagcaagtctgccacccaggcttgtgttagagctgcagtattggtacccagacatttctgaaagctccctgacccaggggaaagtccacctgagtgagtagtttagctgctgcccggagcccgttggcacatattcacgaagtcggcttccaggggatttccctttgaatggaattggcaaacgttttgtctttctgaaagatttcccagaggaattcatttagctatgtggaaaaatctcaaattctaatataaaatctctgaccttttagggttttgaaatttggatctctcatttactgacaaatctttttgaataaagaaaaacaattaacataatagaaaacctaaacagtgagaatgcatattcaacaaatgattggagtgcttacctcaggctaggcactgtttggtattgaggatacactggtgaacaaaacagatgtggctagttgggcatggtggctcacgcctgtaatcccagcattttgggaggccgaggtaggcggatcacttgaggccaggagtttgagaccaaactggccaacatggcaaaaccctgtctctactaaaaatgcaaaaattagccaggcgtggtagtgcacacctgtaattccagctccttgggaggctgaggcacaagaatcacttgaacccaggagacggaagttgcaatgagccgagatcgtgccactgcactccagcctaggcgacagagcgaggctccatctcaaaaaataagccaaaaacaacaacaacaacaacaaaaacagatgtggccaccaccctcaaggagcctgatttttaatcctagctttcaatttatgtttgtgttgaaaatgaggttgattccttccaggaagtatcctttagagtattaaaatatatacaccatccaaaatcctatgcccagcttaaataccataccacaagaggggatgaagatttgtttgaatgtgtgaaataattctcatagactgcagggtgcgtaatatgtgtgatttgaaatatcccatcacaggccaggcatgctggctcacacctgtaatctcagcactttgggagggcaaggcaggaggactgcttaagccaagcttgtccaacccatgacctgcaggctgcatgtggcccaggatggctttcagtgtggcccaacacaaatttgtaaacattcttaaaacattatgagatttttttgcaattttttttttagcccatcacttatcattagtgttagtgtagtttatgtgtggctcaagacaattcttcttccaatgtggccagggaagccaaaagattggacactcctggcttgagcctaggagtttgataccaactagtaactgtcacaaatgaatttaaattcaggtttaaataaaaaaggatgaactaactcccacaccattagggattcattcattcaactaatatttattgagcacttaatatatgctggttattgttcaagttgtctgagctgtatcagtgaacaaaacaaaaatccttgccatcacagaggttaaattgtgggtgggcatgagggacaataaacagtgaacaaatttatgatttttttttttttgagacaaggtctcactctgttgcccagactggagtgcagtggcatgatctcagctcactgcaacccccacctcccaggctcaagcgattctcctgcctcaacctctcccgagtagctgggattacaggtgcacaccattactgcatggctttttttgttgttgttgtattttaatagagatgaggtttcaccatgttcgccagggtggtctttaactcctgacctcaaatgatccacccacctcagcctcccaaagtgctgggattacaggtgttgcaccacgcccagcctaaatttatgaattatataacagaaagaaaaaagatactcaggaggctaaggccaaaggatcccttgaggccaggagtttgaggctggcctgggcaatacagtgaaacctagtctctaaaaaaaattttttttaaactagccaggactgttggtgtgcagctgcagtcccagctccttgggaggctgaggccagaggatcacttgagcgcaggagttcaaggctgcagtgatcatgccactgcactccagtctgggtgacagagcaataccgcatttcaaaaaaaaaaaaaaaaaaaaaggcagaatagcagagcaggaacaaatgaaggcagagggggagaagtattaagaaattaagactgctacaaagttttggctctgaagacttggaaaatgtggtacaaggggcaggaattcgcttgagagggaatagatgagataaggagttctctttcaaacgtggggttttgaggtgccatatgtctcaatgtgaaaaatatcccattggcaattagagaagatccagttccagagaagggtccagctagagacctaaattcaggagacatcagtatagagccagctgttgaggctgtgagactaagttcatcctcctagcagccttaccgagaactctgactatgcaggcaaacagtaggaattacagtataccaggctctttcagagtctgagaagacaaaagtcttcaaaaggtcaagaggagttggtcctgagagtagggacctgaaccagaagcaagggaaaacttttatcagtccacttgggaactagccagtgctggaaagtaccctttgtgccagagatgctgtatgcatttaccgttttcttaaccatgtttcagtttgggattttttagattaataaaatagaaattaatttttaaaaacacttgagaaattggaattcccttatgaaggtcttagaacattttttctttaaaatagaaagttagtttaggaaatacattaaaggagtaagaatccctacttcagtattacagcaggcattacagtgccacaaacattagtgtatcttgccttccttgtacacaaaccatctttatctggggagaaaaacaactatcctaacattatgttttgcattttgtattcattaaatgggagtgtgccttggggaaagtcaaaataggcacaaatttgcgatttgaaaagccacctgctcttctcccggagctacctcgccagcttggaattactctcattaatccatgcaacactagctgctctaagccccatcccctcagctctagttcattattaatcaagggtgcttaacctcattccccattactcgtatttcaacctcagttccacatttttttttttttatttagatagatcttcctctgtcgcccaggctggagtgcagtggcgtgatcatagctcactgcaacctggatctcctgggctcaagccatcctcccaccttagccccccgagtagctgggactactggcgcgcgccaccacgcacagctaattttattttttgtagagacggggccttcctatgttggccaggctggagttaggctttctttctttttttttttttttgagacggagtctcgctctgtcgcccaggctggagtgcagtggcatgatctcggctcactgcaagctccgcctctccggttcacgccgttctcctgcctcagcctcccaagtatatgggactacaggcgcccgccaccacgcctggctaattttttttgtattttttagtagagacggggtttcaccgtgttagccaggatggtctcaatctcctgacctcgtgatccgcccgccttggtctcccaaagtgctgggattacaggcgtgagccaccgcgcccggcctccgctttcaagactaaaaattgcctgggcactgtggctcaagcctgtaatcccagcactctgggaggccgaggaaggtggatcacttgggctcaggagttcgagagctgcctgaccaacatggcgaaaccccgcctctactaaaaatacaaaattagccggtcctggtggcacacgcctataatcccagctactcgggaggatgaggcaggagaatcgcttgaactcaggagggggaggttgcagtcagccgagatcgcgccattgcactccagcctgggcaacaagggcgaaactctgtctcaaaaaaaaaaaaaaaaaaaaaaaagactaaaaattgtcggggctgctggccaaaagaagatcttgcctggctgtcagaaaataatgttctttccagcggctgcttgaacccgcttccttcagtgcctaaatttaacggctgcagctgcagctgcaacctgtttcccccgtaataggaatgaaagtggaggataaaagaggttaggaagaaggcaagccagcagtctgaccagacacaggatgcatgtaagagacttgttaattacacgttctatttaggtcacactgataggcaaatcgctattctgggcccccaggaagccttttcgtccttgctatagtcaattcattctccagatgaaagcctgaaagcgccacgacccaagtttcacgtctatccactcaagaggcctgcttggcgcaggcgcataccttcaaaggcctcccgccctcactccaccacccccttagggggcggggcctcagagctcagtgctcgaactggctccagagccgtgagttcggcatgcaagagcggaagaaacgcggctggtaccccggaagcagtcgctgcaacttccgggaggtgcttgtgtgcctggtgcgggagctacggggcccagggattgtgtttaaagtagtgcttctaccaacatgtcccgtggttccagcgccggttttgaccgccacattaccattttttcacccgagggtcggctctaccaagtaggtgagtgaaccaggttcgcctgtgggccacctgaattgccctgtcatggtacgtgcctggagcgagcagacgcggcccgggtttagtctggggccgaagctgggctggagctgggaagggagaacggctgaagctggattgagctctgtggtgtttgcacccccgtctggacgcagggatcgggggcctgaaggcctgtctctgcagggcgagcggccacactgcgtagacccaatggagagttaaggaagatagggctgtaatgcctgactccggcttcgtgaggccccttcagttattgtattctgtcctggccaggcacaaggtctgtttctaaagggtaattgattccttaacgtctcaactaaaatgcctcctctccgttttcctttgtttgcagcatggacttctgtggttaattccacacaggcactcgaagcctgctatataccagacactgctagtcctaggagatacaaatgtgaatgttacaccctcttctatactgaagctcacagcttagagtgacagatacgttaaacaaacggataaaaaaaattaaaagtgccaatttacaaatatctacagagttcaagacatctttgggaatctgatagaatgagtgactcaattctagagctgctcttgagattggcatcccctttttacccacatctgtttgaatgctcctgtaatttaaatgccgattctgagttgtagatgaggtactgtgtactagtttactgaagaacacctgtagtggaaagaaactatcagttactcggaatagtaatgtattgcgctgaaacggtgtcaaggtttaggttatgattataagccagacccttgatctcttaccatagagaatttagtgtcaggagggcttgatttacatctggtccgtgatggttttatttttgaatgagtttagtggctccgtgtcttgcacagtaatataatcatctgtgcttggaatcataaggagagagttggtctgtaaatgaggttctcttcacctgtaaattttagaaatagagttaaagataacttggaatgaaactgctcagtgtattactgcatagtgtatataatgtagcaagaaacatcttgttggataattcagtagcccttttaatttatccccaattgaaaaacatgattaaagatagaacaaagagataactgtatcctcaaagaattttcatttattgtattaaattcctgagttttaaataattttcgtatattagactactgctttcagcgttccattcgtgatttttaatatgtgaacaggaaaagtcactctgagacctttactttgtttctatatactgtattgtgaagtccagccataaagcataatcgttaatgcttcccagatttggtgagtggaaaggctgaacacagtgtcattgtgatggttttaaaagatttggaagagaacatctatctgaaaacaagttcattatctagacagaatgattttttatttatttttatttttttgagacagagcttcactcttgttgcctaggctggagtgcaatggcgcgatctcggctccccgcaatctccgcctcccgggttcaagcaattctgcctcagcctcccaagtactgggattacaggcatgcgccaccacgcctggctaattttgtatttttagtagagacgaggtttctccatgttgatctcgaactcccaacctcaggtgatccacccacctcggcctcccaaagtgctgggattacaggcgtgagcaccgggcctagcaccagcctagacagaatgattttaatctctgtgaataacacactccctctgctattcagggcattaattagacattgttaggaaaatgaaagtgaaagagtagtatgagcaagcagtatagtgaagagttcaggccctggagtcatacatggattcaaatctctgccctgctccatactacctgatctgggcacttgccaggtatgtaaccttagccttagtttctctttccaaagttgggctcataataattcttccttaaatggtggttttgagaattaaataaggcaatgtatgtagagtgcttaacgtgtgcctgccacatagtaaatgctcagtgaatgttattagatgcttgtttgattctttggcccccccttttttttttggtctattagattagtagctctgtatggaatatttccctttttatgggtccttccatgcttagttctccagtaaaatatatacataatcataatattctaaatactgtctgtttgtaaactttagaatcctccaaagacaaagcatggaaggattataggatgcaagttgttaacattgacagtaggaaaataatattttaaaaatgggatgatgatgaggggagattaatggaaggtaactatgctctttatcttccatacttgggactcaaaagataaatgtcgtctaaagttgatatatcaaaaaatagaggtagacatttaaagttataatgcttggccaggtgcagtgcctcacacctgtaatcccagcactttgggagggcgaggtgggcagattacctgaggtcaggagttgaagaccagcctgaccaacatggtgaaactctgtctctactaaaaatacaaaaaactagctgcttgtgctggcgtgcctgtagtcctacctcctcaggaagctgaggcacaagaatcgcttgaacctaggaggcagaggttgcagtgagccaagaccgtgccattgcacctccagactgggtgacagagctagactccatctaaaaaaaaaaaaaagttgtaatgccaatcataattataaacatactttataattattaataacatattattggcagtgtttgctcccagggagtggagagaaagactttttcttttttttttttttccctttgagacagagttgcgctcttgttgcccaggctggagtgcaatggccgtgatctcagctcactgaaacctccacctcccaggttcaagcgattctcctgcctcagcctcccaagtagctgggattacagacatgtgccaccactcctggctaattttgcagttttaatagagatggggtttcaccatgttggtctggctggtcttgaactcctgacttcaggtgatccacccacctcggcctcccaaagtgctgggattacaggcatgagccattgcgctcggcctgaaatatttctcttaatgtacatatgcaggttgtatgtgtgtgcatgtattcatttgttaaaaattgtagaacacctagctttgtaatctattttcaggaattgcccaagttactagagggaggaggtgcattgtagggggaatgggactgaggccctagttggccaaattcagcctggctacttgtaggcccttctcttctgtttgctgatcctttgctggataggtctggcaaaggagaagaggagtggtcatttggatttgcttgacaggtgtatgtgagcactgcctggttgctacaaagaagggagcgtgctgatagggaactagaaagaaatggactggtggagacatactgaaaataaaatgtagaagtgtcattgtgtattgaagccagaattcctgagttcaagtccttactgcataccaactctaagaactttttatctgtaaaataaagataataaccacctaccttatagggctttaaggatttaattagttaataaatgtaaagcatttaaaacattgcccggtatatatagtaagcactcaatgttttctgggtgtttgtttgtttgtttgtttgtttgtttttgagacagtctcacttggtcgcccaggctagagtgcaatggcgtgatctcagctcactgcaacctctgccttctgggttcaagtgattctcctgcctcagcctcccgagtagctgggattacaggcgcctgccaccatgcccggctagtttttgtattttttgtagaaacagggtttcactatgttggccaggttggtcttgaactcctgacctcatgatctgcccacctcggcctcccaaagttctgggattacaagcgtgagccaccatgccccgccttcaattagtattttctgtaggggatactgtcaagaagaaacaaatggctgatgtaaatggagtcagaaatttcacaaatgactgagaagtacttaccatttgcctcttttgcaatttaaaaaatattcttatttcaaagcagtatttctcaacccaggcttctcatgccctctttgaatctgatttgaaattcaatgcatgtgtgtgcatgcatacacatacatacatgtgcatatctacataaatacatatataactacacagaaaaagtgatgggatcaaatactgctgtattttcaaacctcatattccccctctctttccccctcccccagtgccaagatttctaatgaccccacccccttgaggaatcactgttctaaagagtaaaaggttaggaggcactttatagtgaaccacacatctcaattatgtagcctacaagtttagggaaaagcaaataagtagcttcaaaaaaatcttaacaaagtttttttttttttttttttttttttttgccacacagcattgaaattgaatatgaatatactttctttgtcccagtagaacatcccgttttatttttatttttatttttttgggggggattgagtctcgctctgtcacccaggctggagtgcagtgttgcaatctctgctcactgcaaactccgcctcctgggttcacgccgttctcctgcctcagcctcctgagtagctgggactgtaggcgcctgcctccgagcccagctaattttttatatttttagtagagacggggtttcaccgtgttagccaggatggtctcagtctcctgacctcgtgatccgcctgcctcggcctcccaaagtgctgggattacaggcgtgagccaccgtgaggcctgttttttaataactcatagaatatgtatctctcaattcatttttatttttcaagcccacgtttatatgggagaaaatcatatttacatcccgaaactctacagcattctaaacaaaattatgggtggaaaaagtcttgagttacatttctaataattggtaggacctcagaatcacctgtaaatgctttgcaacacctgatgagtgacataaagggaatatatatctctgctgttgttctcacagcctgagctgtgtacagtgtgagccattgtcttgcatcgtgtgcctgtcctgaacattttgccaccgtgccttttatgtttagccactgtatttttctagtatacaaatgaatcccagagaaattgaggaagtgttggggaaaatggtagggaaggaaacaaagcaaataagatattactatggaaatgacatttctacatacaaaataactgttgataccattttgtttgagcaaggaagcaatttacttcctaacctaatggtttgttgttgggttcaaccatgaaactgctggtctttgactaatttttaacctgtaaaaatggcagtttcgtgtggttcaatctaatacttaggtattttactgtgtatttaagatttagaaaattgggggcttggagtcgagtttaatgcattataatttttcccatttaaaaactggaaaatggggccggacacagtggctcacacctgtaatcccagcactttgggaggccgaggcaggtggataacctaagtttaggtgttcaagaccagcctggcccacatggtgaaaccctatctgtactaaaaatacaaaaattagctgggtgtggtggcgtgcccctgtagacccagctactagggaggctgagacaggagaattgcttgagcccgggaggtggaggttgtagtgagctgagatcgcactgctgcactctagcctgggcaacaaagtgagactccatctcaaaaaaagaaaaaaaaaaggaaaaggaactatgacttattattttcttgcataatcttggacattcaagaatagtttactcagttttagagttctgtaagtttccaaaattttagcccaaaccaaagtctttgatcatgtagtgtttaagtactgttgccaacgtttgaatcctgactttaaaaaataaatatcattttaaaatgctgcccataaactattatttttatctttatttctttattattattattattattttggagacagagtttcactcggttgcccaggctggagtacagtggtgcaatctcagatcactataacttccgcctcccaggttaactcaattatcctgcctcagtctcctgagtagctgggattacaggcgcgcaccaccatacctggctaatttttgcatttttagtacagacagagtttcaccatgttggccaggctggtctcaaactcctgacctcaagtgatccacctgcctcggcctcccgaagtactggtattataggcgtgagtcactgcgtccagctatttattttttgagacagggtctcactctgtcgcccaggctggagtgcagtggtgtaatcatagctcactgtagcctcaaactcttgcactcaagaaattctcctgcctcagcttctcaagtagctgggagtacaggtatacaccaccatgctcagataactttttatttttagtagagatgacatcttggtgtttcccaggctggtcttgaactcctgggctcaactgatcctcctgcctccattcccaaagtgctgggattataggtgtgagccgccgcagtgcccagcctcttttttttttttttttttttttttttttgagatggagtctcaccctgtcacccagactggagtgtagtggtgcaatctcggcttgctgcgacctctgtctcctgggttcaagcgattctcctgcctcagcaccccaatagctgggattacaggcgcctgccaccacacctggctaatttttgtatttttaatagaggcagtgtttcactatgttggttaggctggtcttgaactcctgacctcaagtgatccacccgcctcggcctcccaaagtgctgggattacaggcgtgagccaccatgcccagcctcttttttcttaattggccttcatataccataggttgtccgtatctgctctaaaccatgatactactgtttaccctgccagtgtttctttaaaagatactctttaggtgttgagttgtctaaattctttgctctggcagtttccatttttctggaaattattataaaacatttcatggtggtagtgttaaaatggggattcatttatacaagcctttactgaaattacagtgcagcttgatgagtactaaatagtataaaaaaggtattacaggaagtgactaactgcctaggagagccgggaaaggcttctcagagatgaattggcccagatgaagattaaataaggaaatttgggggaccagtgcatagatcagtcagtgtgaatgcagtatagacagtaacaactgaaagagtaaattatagcaatattttgaaggggcttgagtaccatgctagagtttggacttttttccatgtgttttgaacagagctagcaggggtctttaagaatggcgaggtaattaagtaaaataataggagagttgagtgtagaaatgggattagaaagggactgatggttcacacctggaattccaacactttgggaggctaaggcaggaggattgcttgaggccaggagttcgaaactagcctggacaaaataacaagaccttgtctctgcagaatatataaaatgaaattagccaggtgtggtagtacacacctgttgtcccacatactctggaggctgaggtaggaggattgcttgagccgaaagtttcaggttgcagtgagctacgatcacaccactgcactccagcctagacaacagagtgagaccttgtctcagaaaagaaaataaaaaggggactggtggcaggaagaacaattagaagaggtttgctcagtatcagtaattcatataaaccctaatgagtgaattaaggtaataagagagaaagggtggaggggtctcttgagcttatttttcacatttttattatagaatactttagacaaatgtagatagactagtacagtgaccttcatgtacccatcacacagcttcatctgatgtcaatattttgtcagtcttgttttctccctttcccacgcactttccccgctcttctagagtacgttaaagcaaatcctaggtataagaatggacatttcttgggaaagggcaggaggttagagtcaagagtgataacccaggtttgtagcttgaaaaattgagtggttagtaatacaattatgaaataaggactgtaagaaaagcaggtttataaagaggaagagtttatttttagacatgtctgtggctaataggcataggtatttgaagaaatagacatttgtaattataagtccagagctagagatgacagattagtagtgattatctaggttatagctaaatctctggtttagggtaaaatcatccagggatggagaaaataatagaattctgggaaataccagtatttcaggagctggctgaagagatgaaagcagtgaagaagattgagaagggaagttcagagaagtaggagaggaagagtaggaatgatattcttaacaaagaactttaaatttggctgagcgcagtggttcacacctataatcccagcactttgggaggccgaggcgggtggatcacttgaggtcaggagtttgagaccagcctggccaacatggtaaaaccccgtctctactaaaaatacagaaaaactagctgggtgtggtggtgtgtgcctgtaatcccagctactcaggaagctgaggcaggagaatcgcttgaacctgggaggcagaggttgcggcgagccaagattgctccactgcacaccagcctgagtgacagagtgagactccatctcaaaaaaaaaaaaactttaaaatccagttgctcagttacactagccacattttatgtgctcaatagccacatatgactagtgactatcatattggacattgcaaatatagaacattgccagcatcacagaaatttctgttggacagcactggtctatataaagaacgagggcccccttaatgaatcctggcaaattcacaggtgcattctctgttgagaagcattttttatatgtaaaatgttttttattttgtgagacaaaagtttatgtggtagggaagatactcttttgtggcttttaccttttgcattatttaagcaataagcatgtattcatttatttagttcagggatgacagacacaaatgcttacacagaccagataagtaatgccagtgagtaaaacaggctgagtgaaagataacaggaaatggtgggacctgtggaaaactgcaaaacacctgctcagcttaggtgatttttttttctttgtggccagttgctatgtgggattgaagatcaagtgttactagaatttttttttttctaggaaaaaatcacatctctaaagaccctctgcctgcttttgccatataaggtaacattcacaggttccagggactaggacatagatatattttggggatgcatttaccaacctaccagagggttaatgattttattggctcaaagaaccagtttttgacttagctggtttttctcttgttgtctgttactgtttcttgatttctggccatgttgtccaggctggtcttaaacttctgggctcaagcgatcctccccattcagcctcccaaagcagtgggattacaagcatgagccatcacacacagccagaatcactacaaatttagtggtgtttaaacaacacacacttattatgtcatagtttctttatgtttttcatttgtttttctctgttttcaaaattttttctatttttggttttcagacattggaccataatgaatctatatgtgattttctgttttaattttgcttggagttttctgaggttctttaatctgaaatttttttgtcttttgccatatttttaacatttttagccattatttcttcagattttgttttccgattctttgctctccatataggactccagttgtacatatcttacacattttgatgtagacccacagattcgttgtttttttcaactattttttctgcctttttaagattggatcatttgatgcattttcatattcactcactctttcctttctcatctccattctacagttacgtccatttggtgaatttttaaattttacgtattatatttttcagttctacaatttccttttgcttctttcattttttctttgctgagatttcctatcatttttcattttgagaacattttccatcatgtcattgagcatagttataatggttgtttttaattctttgctaatacagcaacatctgggtcgtctcaggattgttctttttgagaattaaacacaatattcctggtttttgttgtttggttttggttttggttttttagtttgacttgatttgttttttggtatattgagagttccggattgtatcctggacatttatgaatgttattttatgaagactgtggattctgttatatttctccaaagagtattgacttgttttgttctaataggcagttaatttggttattctcaagctacaaagtctgtctcttgggtggcatcttaaatctcactcggtttcttttatccttaactaggccgcttggagtctgccttgtgtgtgttgttatggaatctgctagagatttgggcagtgtttatatatagaagttgggactctcactctctggtgctctggtttctctcccttgttttctggcagctattgttaccccaaactgttctctagttcttcaggccaaaaagactgagttttctgtgggagttcagcctttactgctctcagattatgagccacaaaaatgggaaactcaactcatgccattcctttctcccaactgttgacttcccctctagaatctgactttgtggtgtctttaggtagttgttgttttgtttagagttagtactttttatttgtggagggctgatctgatagaagctttattagccatatcaggatcagaatcaagaagcactttgaaagttgtacagctagtcctccatattcaacccatattcatgggttcatcatccatggattcaaccagctgcagatcataaatattcagggaaaaaattgctcctgtactgaacatgtacagatttttttcttgtcattattcgctaaacaatgtagtataacaactatttagcatttacattgtattagctagtgtagtgtaagctagagataatttctttctttttttttttttaaacggagtctcactcattgtattagctcgtgtagtgtaagctagagataatttctttcttttttttttagacggagtctcgctctgtagcccaggctggagtgtagtggtgcaatctcagctcactgcaacctccacctcccaggttccagcgattttcctgcctcagcctcctgagtagctgggattacaggcacctgccaccatgtctggctaatttttgtatttttaatagagatgcggtttcaccatgtcggccaggatggtcttgaactcctgacttcaggtgatctgcctgtctctgcctcccaaagtgctgggattacaggtgtcagccaccacgcctggccaagctagggataatttcaagtatacaggaggatatacataggcgatgtgcaaatactgtgccattttatatcagagacttgagtttctgtggattttggaatccatgggaggtcctagaaccaatccccacaaatagcgaggcaccagctacattttagaagttatttgtagtgtaggctgagcgcggtcgctcacacctgtaatcccagcatctgggaggccgaggtgggtgtactacctgaggtcaggagttcaagaccagcctggccaacatggcgaaacctcgtctctactaaaaatacaaaaattagctgggcgtggttgtgcacacctgtaatcccagctactcgggaggctcaggcagaattgctccaacccaggaggcaggggttgcagtaagccaagattgcaccactgcactccaacctgggcgacagagtgaaactccatctcaaaaaaaaaaaaaaaaagttatttgtagtgtaatgggatggtaaaattttgctattataattaaccaattaaattgggggttatggctcatacctgctgtaatcccagctactccagaagccgaggcaagaggatcatttgaggccaagagtttgagaccagcctgagcaatgtagtgagaccccatctctaaaaaattgttttaaattaggcatggtgatacccacctgtagtctcagctgctcaggagactgaagtgggagggtctgaatcagaagtttgaggctgtggtgagctatgattgtgccactgcactcagcctgggtgacagagcaagatgctgtctcttgctcaataatgataataatgataaaaccagttaaatccaagccatatttgaagatttcttttcttttgtttcttttttttttttttgaaatggggtcttgctctgttgcccaggctggagtacggtggtgtgagcacggctcactgcagcctcgacctcctgggctcaagtgatcctcttgcctcagcctcccaaggaactgggaccacaggtgtaccaccatgcctagctaacatttttttgtagagacagggtcttgccatgttgcccaggctggcctgggactccggggctcaagcagtcctcccaccttggcttcccaaattgctaggattacagatgtgagccactgcacccagctgaggatttcctttaaggtgatttttctagaatcatttttgctctgttcttttgttctctcttaaatagttagccatttagaaatatttgatgatttattacagtttctattaaaagagattctttagcctgataggcagtagctttcttagctggtcgtcatcacctgtggctttttgaacagatgaggccttggctcagactcagtgcccagagtgacactcgaagacagaattttgaaataatctgttatatgtcaaaatgtaaataatgattgggattatgaataattatttaaaagttatcttctgtgttttcatattttctaccatgagcatgtattgatttttgttgcttttcccctgattacaaaatatgtgcccaggccaggaacagtggctcatgcctgtaatcctaaggtgggaggatcacttgagccagagtttgagaccagcctgggcgacatagcaagaccccatatctatttttaactaaaaataaaataaacaggccaggcatggtggctcatccctgtaatcccatcactttgggagtctgaggtgggaggatcgcttgagtccaggagtttgagaccagcctgggcaacatgggaagactccatctctacaggaaaaaaattgaaaattagctgggtgtggtggtatacacctgtggtcccagctactcaggaggctgaggctggaagatcacttgggcccgggaggtcgaggctgcagtgagctatgatcatgccctggtgctccagcctaggcaacagagcaagaccctatctcaaaacccaccaaaatatgtgtctattattaaatttaaatattgcagaggctgtcctggtggctcacgcctgtaatctcagcactttggaatgctgatatgggaggatcgcttgagctcagaagttcaagaccagcctgggcaagatagtgagacgtcatctctactaaaaattttttaaaaaagaaaaatttgggccaggtgcagtggctcatgcctgtaatcccagcacttcaggaggctgaggcaggcagatcacctgaggtcaggagttcaagaccagcctagtcaacatggtgaaaccctgtctttactgaaaatacaaaaactagctgggtgttgtggcgggcagctgtaatcccaactactcaggacgaggccgaggcaggagaatcgcttgagcccgggaggcagaggttgtagtgagccaagatcatgccactgcactccagcctgggtgacagagcaagatctgtaatcttactgtcgaaagacagccattatcaattatgctacatggtgccaaagcagtttttttgtaagctactattttgatcctagtgttttaaccaatagaatggattgacagcagctggaagtgcataagctgaggtttgttatagatggagtcatatgttggcctggcatggtggctcacgcctgtaatcctaacactttgggaggccgaggtgggtggatcacctgaggtcaggagttcggcaccagcctggccaacgtggtgaaaccccatctttactaaaaatacaaaaacttagctgggcatggtggtgtgcacctgtaatcccagctactcaggaggctgaggcaggagaatcacttgaacctgggaagcggaggttgtagtaagccaagatcgtgccacctcactccaacctgggcgacagagcgagactccatctcaaaaaagaaaagagtcatatgttgtaggtaacataaaaattgcaaaaagcatgatccagaaatattcaacttggtagacaaaaattaatgcaaaataatcaaacagcaattaaaacttcatgtggtcaaattagttactgaccaaaagttaacaaaagtattaagtctagaaaaaatttaaagcagctaaatttgacctgggaaaaccagacttagaaataatggccacaaaaaaccttttaaaatgacaaaacatcattgataaagatgcagtatgataaaaattaaattaaaccattattggggcggggagtggtggctcacacctgtaatccctgcactttgggatgccaaggcaggtggatcacctgaggtcaggagttcaagactagcctggccaacacagcgaaaccccgtctctagtaaaaatacaaatattagccagatgtggtggcacgcgcctataatcccagctacttaggaggctgaggcaggagactagcgttaacctggcaggcagaggttgcagtgagctcaggtcgcaccactgcactccagcctgggtgacagagcgagactctgtttaaaaaaagaaaaaaactttattggaaattgggtgcatcagcttaatgaaaataatttcagtaaaatgaaaatggaagaaatggagttggtttaactgtgacttgtggtcattattattattttgactttgcacatcctggaatgctatatgagcattctgtgttcatgtagctctttctcattctttttaatgactattatttcattgcaagaatctacagtaatttattccaacttaaaaaaaactgttctgttttccagaatatgcttttaaggctattaaccagggtggccttacatcagtagctgtcagagggaaagactgtgcagtaattgtcacacagaagaaagtacctgtaagtaatactgcccaaatagttaataattgcagaatataagaatttttcagccaagtgcagtggctcacacctgtaatcccagcactttgggaggctgaggtgggcagatcaccttagatcgggagttctagaccagcgtgaccaacatggagaaaccctgtctctattaaaaatacaaaattagtcaggcgtggtggcacatgcctgtaattccagctactcgggaggctgaggcaggagaatcacttgaacctgggaggtggaggttacggtgagccaggatcacaccattgcactccagcctgggcaacaacagtgcaactccgtctcaaaaaaaaaaagaaaaaagaaaagaaaaaagaatttttcatgggtttgtagaaaagtgtatttttatatacaaatattaacataatcttgctttgaccctgctttcctgtcatccaagaagtgtctattgaacgtctatatacagttcagctgtgtggacagaattaacttattaaacttcatggcgtgattataagcataacggtgtttctaagtcttttgtctttggggaccttgagacaaatttttattaagctattgcttgtccacaggaaaagtatcatctagaaaaggtaaatagagcccctcgaaactaaaattgattttaactataaaatgatcagaagacatttattatacagtttatttttatggttccatagtattgttttctccaagaagcagggcaaattaaaaacataattttttttataactacacagaaacctgtatgttttttaaaaaattatctttgtttattttgtttattaggacaaattattggattccagcacagtgactcacttattcaagataactgaaaacattggttgtgtgatgaccggaatgacaggtaattaatctgtagatatacaagacatctgtagatatacaagccttttgttattttcttcaaattattttgagttttgtattaattttaaacttattgcctgattttcaagtgccatgagtggatttgcagtcttctaagactagtatcaatattttaagagtattgtgagcttttttgaaattatacctataatagaattagatgcttatgctgctgtcggagaaactgggctgagggccctttcatagatgattttatcttatttcagctatagttagtagtttaaggggacctaactcagtatatctcaaacctggtaataatggcatcggttagaagtgagtgagaattattatgaaaattattttaggttgggcacagtggctcacagttgtaatcccagcactttgggaggccaaggtgagaggattgtttaagaccaagagttcaaaaccagcctgggcaacatggtgagactccatctctataacaaatttagaaattagctaggggctggtcacggtggctcacacctgtaatcccagcactttgggaggccgaggcaggcggatcacttgaggtcaggaattcgagatcagcctggccagcgtggtgaaactccatctctaccaaaaatacaaaaattagctgggcatggtggcgcacgcacacctgtaatcccagctattcaggagggtgaggcaggagaattgcttgaactcgggaggcagaggttgcagtgagctgagattgtactactgcactccagcctcggcaacagagtgagactgtctcaaaaaataaaaacaaaaataccaaaaaacttaaccagctatggtggcaggtgcctgtaatcccaactactcaggaggctgaggcaggagaatcgcttgaacccgggaggtagaggttgcagtgagccaagatcatgagactgtactgcagcctgggcaacggagcaagactccatttgaagaagaaaaaaaaattagctggtatggtggcacatacctgtagtcctagctactcaggaggctgaggtaggaggatcacttgagccaaggaattcaaggctgcagtgagctatgatggctcactgggtgccagtccaagaccccatctctaaaaaaaaaatgaaaaactaatttaagcctaaaaacaaagattaagaaagattattctctctcaaggcctttttttttttttttggagacagagtctcactttgtcgcccaggctgctccgcctcctgggttcaagcaattctcgtgcctcaacctcccaggtagctgggactacaggcatgcaccaccacgtgcagctaattttatgtttttagtagagacaggatttagccatgttggccaggctggtctcaaactcctggcctcaagtgatccgcctctcttggcctcccaaagtgttgagccaccatgccctgcctccttaatgctttttcttttgggagttactggatacttgcagaaactattttgactgctgatgaaaggctcagtataaaaggggagtactgtgtagagagcttcatgtttttaaatttttttcatatacttgttgatgagttatttagtattcattgggggagaaaaagccgtagcggaccctttctctttaactcatgtatgtctatatggtgggaaaattgcctggctaaattgcctggctttcaggtttgttctttccttctaaccaggtaaatctttgttttttatgctataagctgacagcagatcccaggtacagagggcacgctatgaggcagctaactggaaatacaagtatggctatgagattcctgtggacatgctgtgtaaaagaattgccgatatttctcaggtctacacacagaatgctgaaatgaggcctcttggttgttgtaagtatgctaagaggtctcccaaataattgatgaattgaaactttttacagaacatgtatacagaattatttaaataacacttgagttctgaacatgtggtttggaaaatacatagagtgggaaaatctttataataaatcagaactaaaggataggtttcacaacagtatgtcgggcattatctttaagctttagatgctgttagactttttatcaaagtatttccatttggtgtatgtgatttgaaagatgcaagtcctcattattaggatgttgtaatgaggttctactgcaattcgagattactaattccatagaaatacctgcatcaggcatcttaataatgtagctgtttgttttgaccaccctaaagaattagggtcacacacaggtgtgtaattcacatttttagaataaatttctatttttgaaaacaagtaaaattgtattgggagagggatgagatttactgatttttagatgtgatgtaataaattagcctgaaaaattcagtgcatgtttgtttctgacattgtgtcattcatttatgagcattaaagcagtcagtgtaatgatttctgtttagcatctgaccctcttgacttctcacttaaaaattacttaaatcatattcatcttgcaagaccttgaaggaaagaagtatttgttgtttccccaagcagtaagtgggtacttttttgtgttgcccttatattttgtatatatcaaatataagaaagcagtcaaaccattaagtactttgttacctgttctactgagtagaaagaaatttaatgatggtgtttattttaattgtattcctataatatggtaacattagaattgtagtaacaaagttacatgtatagaatttagagcttggtttgtgtgacttactagaggagtatataccaacagtaatgaagatgggcagtgtaaaggtgagcaggtagcctgtaagtgtatttcagtttgtgccagcattcccaaagtgtgtcccatacactgttccctggaaccttaataggtatttctattttaaaaaaaaagtatttcttggtcaaacaaacagaagaactactgagttaaagttaaataggtcaatctacaacagaatatttcacagcatttaatatgctattatttattatctgtttccagaaaaggtatatgaaagtgtttttgggccaggcacagtggtgcacacttataatcccagcactttgggaggccgaggcaggaggatcacttgaacccaggagttcaagaccaccctgggcaacagcgagtcctcgtctcctaaaaaaaaaaaaaaaaaaaaaggttggccagatgcagtggctcacgcctgtaatcccagcactttgggaggacgaggcaggtggatcacaaggtcaggagatcaagaccagtcctggctaacacggcgaaacccggtctctactaaaaacacaaaaaattagctgggcgtggtggtgggcacctgtagtcccagctactcgggaggctgaggcaggagaatggcgtgaacccgggaggaggagcttgcagtgagccgagatcgtgccactgcactccagcctgggagacagagcgagagtctgtctcaaaaaaaaaaaaaaaaaaaaaaaaaagtgtttttgaagtttatttgaccaggcaacatcttgaaggattagggttcaaataaacatgcttggataacagcaaggattggaaacactatttttaaattgtatttgtaattattcaaactattttttttaatctgtgataaatccttttgtgaaatgggaatttacctgttacctaatttacctgtggtgataacctgtattttatcagttttcttaaaggaaaatacatatcctaaaattgatggccaaagtcatgattagcagcagctatgtgacaccaccaagaaagaggagatgtcattgtataaagctaaaacatttaattagggtcttttctctttttaggtatgattttaattggtatagatgaagagcaaggccctcaggtatataagtgtgatcctgcaggttactactgtgggtttaaagccactgcagcgggagttaaacaaactgagtcaaccagcttccttgaaaaaaaagtgaagaagaaatttgattggacatttgaacagacagtggaagtaagtcaaccaaaaggagctgactttttttatgctatatagaacagtgaggatctttgtataatttctatacaaagctattcctgaattacatcccaggattcaagttgtcaacttaataatgaaattgatatcatacagctgacataggaaaatttgagttgcttttattcacttaattccttatttcgtaatgtatttgaggtggctttcaacaaaacgcatataataggaaaatataaataaaaataggaaccagctgggcatggtggcacacacctgtagtcccagctacttgagaggctgaagctggaggactgcttgagtctaggtgttcgaggccagtcctatttactgccaagaaattaaaaacaaaaattttagtagattttgggtgtaagtctggaattaaagccattctgaagatgctaacaacatgcttctgataagtgaccaaaaaaaaattaccatctaatgcttttacgtttggtttggaagtatgcttaaaggagataaaaagctagttcatgttcaggaagtactgggccctgtctaaatatttcttaaaggtttcttttattgcaattcataattaattacataaataaccacatccggtaaaaaaacacttaaggtggctcacacctgtaatcccagcactttgggaggcagacagatcacctgaggtcaggagtttgagaccatcctggccaacatggcgaaaccctgtctctatgaaaaatacaaaaattagccgggcatggtggcaggcgcctgtaattccagctactcaggagactgagtcaggagactcgcttgaatccacgagcctgaggttgcagtgagccaggctggcgccactgcactccagactgagcgacagagtgagactctgcctcaaaaaacagaaacaaaacaaacaaacaacacttaaaacattcttaaatcgtttttactgtaaattccttgaagatgcagagagtatcattcatctttatccttttcccatttcaccccaagtgctaagtgaagtgtagtgcctgggtcatgaagccaataaacctttttgtataaatcatcctattttaattaatggacccctttattatttgacttggtagaaaaaaatttctcatcattgggaggcaatacattagagttaagcagtctgttagtaacattgaactacctcattgaaacatggagctcctgattgactcatgatttgaataagctaggaatgagaaaaccttggaatctctaaaaaatactatattttaacattaaatactttttttcagactgcaattacatgcctgtctactgttctatcaattgatttcaaaccttcagaaatagaagttggagtagtgacagttgaaaatcctaaattcaggtgagtgatattgtgggccacatgcagactagaaaggtggaggcgtgtgagtccatgtgtcctataacttgtgggggaaatcttttttctttaactgtcattatagtttttgtttgtgtgtttgtttttttccccagcacctgagatctgtttttaaaactttggactctatttaagagtcagatatgaaagcttttctccttatttcagagtgattttatatctaacaccagagatgacataaagttaccttccttatgtaaggaaaaaaattagcataagtgttttcttttttttagtttaaggccaatacaaattcaattcccaaagtagtagtttgcaagtttttcagatagaactttggttatttagtggttatttaagtagaactttgaggagcaatatgagttactgatatatgtcagacccttatctagagatctttggaaagcccaaattttgaatacagctaattgacttgcagttgctggatgtgtgtgtgtgtgtgtgtgtgtgtgtgtgtgtgtgtgtgttcttactcactaagtgactaactcccacacatcagccttatagcttccatgattcaaatccatactgagtgcttcgtataatcagctcatttaatcctcccagcagccctgtgaggcagttgatataccatggaccaggatgctcttatctttaatgaaaatactgcagttaaatcgacagatacaaggaactactgggaggcattttaactattatgtgtatctattcttagatcacaaccataaagacacatggtcttggttgtggtgtggggtacgggagtggtaaactaagcttaactagaccttgaagaggtttttcgtttgttcttttttttcctaatttgttcttttggttgcccacagataagtcatataaacatgacagattcagaaaaattcataggactttaaaaaaaaaaaaacagctgggtgctgtggcatgcatctgtagtctcagctcctcaggaggctgaggcaagaggatggcttgagccttggagttgaaagctgtagtgcgcaatgatagtgcctgtgaatagccactgcactctagcctgggtaacatagtgagacctcatctgttaaaaaaacaaccgacaacaccaaaagcgaatctatcctagcttttcttcccgtaggaagaagtcttgtaacttgggttggggtaggggtgaggggtgggggcagggatcaagttgcttttgaaaaaggtgccttttttttttttaagtaaaaatttcagcaagaataatcttaaaatctctctaaggaacctacaattagttcttgttttcttttctgtttggagaccttcctgccacctttaaaattgtatttgttattttttaaattggtaaggaatcaaaaatcttgtcttcaaaaaactttgtatcatttataaattctgtgatagtaaatatatgtaaataattacagtacatagcataagcatcaacaactatttaaactgcttgatattgccttcagttgcactaaaaaatgtccttttgacaaatttcactttttagaagtctagtagtaataggtcacattaacaaggttgccaaacaattgcttcctttcgaggcaaacatcatttagaaaatacatgttcagggccacacatggtggctcacacctgtaatcccagcactttgggaggccaaagtggacagatcacttgaggtcaggagtttgagaccagcctggccaacatggtgaaaccccatctctactaaaaatacaaaaattagccagatgtggtggtggacgcctgtaatcccagctgcttgggaggctgaggcaggagaattgcttgagcctgggaggcggaggttgcagtgagccaagattgtgccactgcactccagcctgggcgacagggtcagactccatctcaaaaaaaaaaaaaaaaagagaaaggaaatatatgttcaacatggagcactctctggctggtagactattcatagaattataactttattttcatgaacttctgaatctgaacactttaatatgcttaaaatttcttcatgaatttttatctttgagctgacataaatttcagttatactacatataaatgtattttgacggctgggcaaggtggctcacgcctgtaatcccagcactttgggaggctgaggcaggcgggtcacgaggtcaggagttccagaccagcctgtccaatatggtgaaaccccatctctactaaaaatagaaaaattagctgggcatagtggcacatgcctgtagtcccagctactcaggaggctgaggcagaagaatcgtttgaacctgggaggcagagcttgcagtgagccgagatcacgccactgcactccagcctgggtgacagagcaagactctgtctcaaaaaaaataaaaaataaatgcattttgacatagaagctaaatagaatactttatagtttagctttatttatgttattcaattgaaatattttctatcttagctgcaactaaagaattttattttcaagatacaattctaaatctgatgtcaaagtaaacatttttgtgtataggtgaaggtggtataatatctgggaattccttcaaaataatctgagggaagataagtgtgtgtatagattttttaaagattggtttataaattgataattgttaaagtaggttgataggtatatgggagtttattatactatcccacttttacgtgtgtttgaaaaaattttttttaaatcgttgtttttttcccccttttgccttctaggattcttacagaagcagagattgatgctcaccttgttgctctagcagagagagactaaacattgtcgttagtttaccagatccgtgatgccacttacctgtgtgtttggtaacaacaaaccaacatcatggaggtccctggattgaaaaaggagcctctcccactcctcctaccaccgaagtggttaggactctatataaataaaaacaaggcttttggaaaataattgcatcctgttgttttcacctcctattttaaaatttatttttgacacctaatgtacatatttatggggtgcaatgtgatgtttcgatacatgtatacattataatgatcaaattagggtgattagcatatccatcacctgaaacacggtgtttttgtggtgagaacatttaaaatcctctcctctagctattttgaggtacacaataccttattagttttttgttttttaaaacaagatcttgctctattgcccaagctagagtgcagtgccatgattatggctcactgcagccttgaactcccttgttaagtaatcctctcacctcagcctccttagtagctggtactacaggtgtacaccattgtacccagctaattttattatttttttgtagagttggggtcttactatgttgcgtgggctggtctcagactcctggctagcattaagcgatccttctgcctcagtctcccaacatgctggggttacaggcatgagccacagtgcctgggtccacagtaccttactgttgactgtagtcactctgctgtgcaataggataccaaatcttactccttttttctcttttttgagacaggtacttgatctcacccaggctggagtgcagtggcaggcgtgctcatagctcactgcaaccttaaatacctggggttaagcagtcctcccaccttagcctcccaagtagctaagactacagacatgcatcaccaggcctggctaattttttatcttttaaaatattgacataggggtctccctatgtcacccaggctagtcttaaactcctggcctcgaacagtcctatctcaggctcccaaagtgctgggattacaggtgtaagtcactgcactgggcccctcctgtctaattgtaactttttagctgttcaccaccttctccccatccctcccactaccacctccagtccctggtaaccactgttctatgtactattcactacttatagatcaacgtttttagacttggcatgtaagtgaaaatgtggcatttgtctttctgtatctggcttattttcacttaatgtattgtcctctaggttcattcatgttataaataacaggatttcattctttttaatagctgaatagtgttcctttgtgtatatatatcacattttctttatccattcattcactttgaacacttaagtcagttatatcttggctattgtgtatagtcctgcaataaacatgggattgcagatacctcttcaacatacggatttcacttcctttgaatacataccaaggagtgcagttgttgggtcatagagtaattctgtttaatttttttaggaacgttcatactgttttccataatggctgtactcatgtacatttcccttaattgtaagggttcccttttctctgcatcctcaacacttgttatgttttgtctttttgataatagttattctaactagtgaggtgatgtctcattgtggtttgcctccaattttaagtattaagcctttggtatatgcagacaaatattcaccatcttcacattgtagctttagtcattttgttgacactggtacaagtttacttggcttaagacatttcatagccagcaccaggcgtgctggctcacacctgtaaccccaacacttcgggaggcttagccgggcagatcacttgagctcaggagttcaagaccagcctgggcaacaaggtgaaaccctgtctctaccaaaaatataaaaacttagcatgcacatctgtggtcccagctacttaggacactgaggagggagaattgcttgagctcgggggatagaggttgcagtaagcagagattgtgccactgcactccagcctgggtgacagaaatgccatcttaaaaaaaaaaaaaaagccagaaatgtaaactagctatatggtataattaaataacaaactacaactttggttttgaaacccactctggccgggcgctgtggctcacacctataatcccagcactttgggaggctgaagtgagaggattgcttgaggccgggagtttgtgatgagcctggactacatagcaagacctcgtctctacaaaaaatttttaattagctgggcatggtagcctgcacctgtagtcccagctactcaggaggctaaggcaagaggatcacttgagcccaggagtctgatgctgcagtgagttgtgattgtgccactgcacttaagcttgggtgacagagtaagacccggtctccaaaaagaaatccaccctgaccgtaagttggcatgtgaggaaaggcctttattttacaatttctcattcaaacaagatactactgaatgtggactccaagtcccactgaatgctttaactataataaaaggattagtatgatcttccatagttttgagaaaagcatttatactcattaagaaccagtattttcaagggtagaaattttagttaccttcaggaaacagggctagaaaagtcatagaatgtgtgtagtttctgtgcctccttaataataagtacttgaagataacattaaggaattggtttatattaaagtttagagacccagcatcacaatgttcaggaagaaagaacaaactgtatattcatggtaacttttttttttttttgagacagagtcttgctctatcgtccaggctagagtgcagtggcgtgatcttggctcactgcaacttccacctcccgggatcaagtgactctactgcctcagcctcctgagtagctgggattacaggcacctggcaccatgcccggctaattattattattattattatttttgtatttttagtagagacggggtttcaccatgttggccaggctggtctcgaactcctgacctcgtgatccacctggctcggcctcccaaagtgctgggattacagctgtaagccaccgcactcagctgtagcctatgttttttttaatgtacaggattttttaaagtccctagactggtgacctgaaccactaattagagatgattaaaaaatcttggaaagtctaagggtaatacattttgtgtcctcttttgcacagaggaagtctggtgctgttgacctcatgcaggtgagtgtggctgctggtctcatgccagtccctgaaattagagttgcccctgtttctgcagccaccagggccacacaaggggaggccacataaacatatgaccagtagaagcaggaaacttcaccaaccacatcctcttcagagctgtcaggaatagtaaaatttcctaacaaggaagcagggttcttccttgttcttccaggttgttctaggattacccatcctaatccactaggctctttgaaagtgctgccatcgtttcgaaagtggggtctatgtaaaagggctaatcctctaaagacaagctgaatttccacacccttagagccttgactgatgtcaccctcctagaatcagtggatgagagactagcaactaattcagttttactgttaggggctccttttcagaggtgaaaaactaaaattctgtaatttgttagaaagtaagtttttacattataaggcaaaatctagatgaattaggattaaatatagaatagttttaaatattggttgtttatgcttaattaaaagaatgagaagaaatagatcattttaaataggtgaacattaggctgggtacagtagctcatgcctatagtccccaatacactgggagcccaagaccagtgtggcaacattttgtctctacagaaaaatttaaaattaggtcaattgtggtggtgcacacacacctggagtcctagctacttgggaggcttaagtgggagggtcacttgagcccaggaattcaaggctgtagtaaactatgatcacaacactgtactccaggctgggtggcaaagcaagaccctttctctaataatgaaaataaaagggtggacattaaatactctaattctggctgggcgcagtggctcatgcctgtaatcccagcactttgggaggctgaggcaggcagatcacctgagatcgggagttcaaaagcagcctgaccaacatggcgaaaccctgtctatactaaaaaaaaattagccgggcatggtggcacatgcctgtaatcccagctactcgggaggctgaggcaggagaatcgcttgaacctgggaggtggaggttgcagtgagccaagatcatgccattgcaccccagcctgggcaacaagagtgaaactctgtctcaatcaatctgtttcttgttttgttttctaaacaaactacctggaatggataacaaagggttaatgcagaaaggttatacaaaatgccaagaaaaatgcctgaaatctttaaatatctttactcaaagaacattttgattagtaagaaatacacataccaggcacagtggctcacgcctgtaatcccagcactttgggaggcccaggcaggcggatcacttcaggtcaggagttcaagaccagcctggccaacatggcgaaacccagtatctacaaaaatacaaaaattagccagatgtggtggcgtgcacctgtaattccagctactcaggaggctgcggcaggagaatcacttgaacccgggaggccaaggttgcagtgagctgagatcggaccactgtactccagcctgggcaacagagtgagactccatctaaaaatcaatcaataaatataagaatacagatatgaggccaaacacagtggcttatgcctgtaatcctggcactgggaggccaaggggggtggatcacttgaggtcagaagctcgagaccagcctggccaacttggtaaaaccccatctctactaaaaaatacaaaaattagctgggcatgggggcgcacacctgtagtcccagctacttagggggctgaggcaggagaatcgtttgaacccgggaggcagaggttgcagtgagccgagatcccgccactgcacttcagcctaggcaagagagctagactgtctcaaaaaaaaatacagatatgattttttaaatatgagaaatataataattctgacactcagaggatatgtccagacattcatgaacgtgaagctatttgggtagacatgaggctttccttctcttgatacctcatttttcataagcagttactgtaccatttaggttacaagtcagcaacaaaccaggtactcagctccctcactagcctccaaatccaagatccagatttgtgacacaaccaaattattacattaaggatcttcacgtaggggcacacacctgtagtctagctactcaggaggctgaggtgagaggatcacttgagcccaagaggtcgaggctatagtaagctgtggtcacgccactgcactccagtctgggggacagaatgagacacctgtctcaaaaaaacaaacaaaaatctaaaatgacagctaagctaattaacatcataatggtgaattagtttaaatttttttatttttatttatttttattctttgagacggagtctccttctgtcacccaggttggagtggaggggcacgatctcggctcgctgcaacctccgctcccaggttcaagtgattctcttgcctcagcctcctgagtagctgggattacaggcgcgtgccaccacgcccagctaatttttgtatttttaatagagacgaggtttcaccatgttggtcaggctggtctccaactcctaacctcgtgatccacctgcctcggcctcccaaagttctgggattacaggcgtgagccaccacgccaagcctgttttatttttgtagaggcagggtctcgccatgttgcccagactggtgtccaactcctgggctcaagccatcctcctgcctcagcttcccagtgttggaattacaggcgggattacagccaccatacctggctccaagatggcttctaactccatttattttacattctggaaattccagctgatacaataagaaatgaaattaagaggtattggaatggagatagaattataatctactatttagattatttacctaaaaaaataagaaagtgacctaataaagtattagtctttattgggacaggccctgttttagatacaatatcctttaaactggtttaagttgaacatttataatttgcttgtctacagttccaaaattcaggaagttcttaaaactcaactggctttttatatctcactttatttctgcagaaatatgaatgtgcttaattatagggtgctgccccagactccagtggtagagttatggaatatatggtttagacatcatattaccactctaaaatccaaaatacattatattccgaacgcatctgtgccaggcgtggtggctcatgcttataatcctcgctggggaggccgaggtgggcagattgcctgagctcaggagttcgagaccagcttgggtaacatagcaaaaccccgtctctattaaaaatacaaaaaaaaattaggcgtggtggcgcacgcctgtagtcccaggtactcgggaggctgaggcacaagaatcgcttgaacctgggaggcagaggttgcagtgagccaagattgcaccactgcactccagcctgggccacagagtgagactctgtttaaaaagaaagaaagaaagaaaagaacctggccccatgccttttggataaagaataatagacttatactattattattcccctgttgcgggtaaaaacaaacaaacaaaaacgaaaacaaaaactgagtccaagttaagtaatttggccaggatcacacaactacaatgtgtcaatgacaggactagaacacacaatagtctgacttcaagatgcatctttgtcaggatgttagacgaaatctacaatcactttttctcagattgcccccttcccaaccatcccaaaaatgtataaaaagtaaatacctttcctatataccaggaataaatgtttagaaaattatgtaagtacggcacaatagcaacaaaaatatagataggaatcgttctaactggaaatattgacccatgtgaaggaaagtaaaaaacttgactgcgagacctcctgctgctagatggaagtgctgactattgtaaagtcagttcttttccaaactaatgtgtagacttaaagtcattctagtcaaaatactaaaaaaaaaaaaatgtgtttttaaaacttagaattgccaagcaacagaccttagcatatataagaatttaatatatgataaaattagcaccacgtatcaatgggaaaataattctagggagaaaataactatgtaggaaaaaatattctttgtcttacatcttacaacaaaataaaatctaagaggcttcacaaggtaattaaaaatatatatatatttaaaaagagctagaagaaggaaaaagagacagaaaataaaatagtttagttgaaaaacagatctccacatggagatccactttctaaagaacaacaatgcactttgggaggccgaggtgggcagatcagctgagaacaggagttcgagaccagccttgaaaccccgtctctactaaaaatacaaaaaattagccaggccttatggtggacacctgtaatcccagctactcaaaaggctgagggaggagaatcgcttgaatctgggaggaagaggttgcagtgagccaagattgcaccattgcactccaatctgggtgacaacagcaaaactccatctcaaaaaataaataaatgataaaaaataaaataacaatggataaaaatcatgaagggaaaacatctatatatttcactacttaaaaatgtaaaattttgttaataagaccccataaacaaagttcaaataggagaaaatattaacacataaatagaaaaatataacaacaacagacaagtcacgaaaattttctagtctaaacctaaaaactcaataattttaaaatgaaaattacaagataacatattttctatcaaattactaagacttttacattaatagcacataatatacttggtatattgcaagtgtttcataagtatttgttgtatgaaggagtgatgaagtatattaaaagttagctactccaggccatgctcagtggctcacgcttgtaatcccagcactttgggaggccaaggcgagcagatcactagatcaggagttcaagaccagcctggccaatatgatgaaatccccatctctactaaaaaataaaaaatagctgggtgtggtggcatgtgcctgtagtcccagctactcaggaggctgaggtaggagaattacttgaacccgggaggcggagtttgcagtgagctgagattgcgctattgcactccagcctgtgccagagcaagactccacctcaaaaaaacaattaaagttagctactccttttgctggtggaagtacaaacatctttctggagggcaacatggaaatatgcatcgagaaccaaaaaaaaaaaaaaaagaaagaaagaaaagttacccatttgtaagaatgtgtctaagagaagtaattagagatgaggaattgtgtcagagtaatttttatatacaacaatataattttatatacaatgataaattccattgcattcaatactgtggaatattatgcggccactaaaacctctgttttgaagaatatttaatgatatggaaaacatttacaaatgtaatattatgtttaaaaaaatggaataaaatatgcagtgtgatccctgcagcagacattttggtactctgccttcctcatttctgccataccatggtggatagtcctgactcctgccaacggcatcccacccagaaagtactttgtgcagttctctgcttccctgcctcagggctttctctgaaatcaggaaaacctgctcaggctgtgcaagcctaatacagcctgaaactttggggtaaataatgccaactggagctgatggatcaatgtcccagcttcttgttggggggcatttctgggatgggctatagatgtccctagaactctgaagctgtatgcaaaatttggtgcatgtcctaatttcctgggagaagcccatagcttttatcagatattcaaataagtctatttgccaataaaggagaaccactggcataagggaaacagtagaaggaagaggatcgaatggcaacagtggttattctggtgaaattacaagggcattttttcccttatattcttctgcattttccatatttaaaataagaaacatgtatgaagaaattgaaaataccccagatatacagcaaaaggaaactgattaagaaattacagatcaataaaatactttgctgccaaaattgttgttttttttttttttttttttttgagacagagttttgctcttgtcgcccaggctggagtgcaatggcgtgatctcggctcaccacaacctctgcctcccgggttcaagcgattctcctgcctcagcctcccgagtagctgggattacaggcatgcgccaccgtgcccggctaattttgtatttttagtagagatggggtttctccatgttggtcaggctggtcttgaactcccgacctgaggtgatccgcctgcctcggcctcccaaagtgctgggattacaggcgtgagccactgcgccccaccaccaaaaatcttttaaaagaataaaatgatactgagtctgggtgtggtggctcacacttgtaatcccagcactttgggaggccaaggcagggagaatcgcttgagaccaggagcttgagaccaggagtttgagaccaagcttgggcaacatctctacaaaaaaacaaaaaattaaccaggcatggtggtgtgtgcctgagggctcagtaacttgggaggctgaggtgggaggatagcatgactccaggaggttgaggctgcactgacctataatcacaccattgcacttcagcctgggtgacagagtgaatccctgtctctaaaaaaacaaataaaacggcatcaaaaacatttatgacacaattgggggaaatcaggatataagattgtttacaaagtctaagatgtcaacaatgtaaacaaggtggggggaaaagctcctggaactactaagcatttatag

SEQ ID NO: 1536 - DNA, 1920 bp, Homo sapiens
ttgatctgacgagtgcttccagaggttctactacatacacaacttgcttttaactggtaatggaaataaacaggaagacaattatctagtcactgatggcagctaaaaattattttgctaccagagtgccctcagaagtatactcttatctaatggatcgagttattatgataactgtggtaatttgttgttataaatagcagtaacataggaaggttttggtaacttctgacaagaaatttgatgtagagagttaatttcgagcacattaaaatgactgtcccactcatctcttcagtgctatttaaaagccagcccaagaagcaaatacttgagaaatcaatagtaggggctttaattttgaatatgatagacattaattcattttaatgagaccaggtcagattgcctcatcactctcagatggactagaacattatatagataccaagttcagttcacatctaaatatttaaagtctactattaaaagaggtttcctggccgggtgcagtgactcatgtctgtaatcccagcactttgggaggccgaggcgggaggatcacctgaggtcaagagattgattgagaccatcctggccaacatggtgaaaccccgtctctactaaaaatacaaaaattagctgggcatggtggtgtgcgcctgtagtcccagctactcgggaggctgaggcaggagaattgcttgaacccgggaggcggaggttgcagtgagctgagattgcaccactgtactccagcctgatgacagagcgagattccatctcaaaaataaataaataaataaggtttcttgtgctttctatgactgcatcagaacagagaatgtcagtatccaataggatgccagtggaattccctgacgattccatccatgcggctctgctggagcagggtagtgtcctaggctgggagaatgggatggagcctccacctcatgaagtagcttcctttggaggtggctatggcaggtcttcggagagaatatgcttttaaggctattaaccagggtggccttacatcagtagctgtcagagggaaagactgtgcagtaattgtcacacagaagaaagtacctgacaaattattggattccagcacagtgactcacttattcaagataactgaaaacattggttgtgtgatgaccggaatgacagctgacagcagatcccaggtacagagggcacgctatgaggcagctaactggaaatacaagtatggctatgagattcctgtggacatgctgtgtaaaagaattgccgatatttctcaggtctacacacagaatgctgaaatgaggcctcttggttgttgtatgattttaattggtatagatgaagagcaaggccctcaggtatataagtgtgatcctgcaggttactactgtgggtttaaagccactgcagcgggagttaaacaaactgagtcaaccagcttccttgaaaaaaaagtgaagaagaaatttgattggacatttgaacagacagtggaaactgcaattacatgcctgtctactgttctatcaattgatttcaaaccttcagaaatagaagttggagtagtgacagttgaaaatcctaaattcaggattcttacagaagcagagattgatgctcaccttgttgctctagcagagagagactaaacattgtcgttagtttaccagatccgtgatgccacttacctgtgtgtttggtaacaacaaaccaacatcatggaggtccctggattgaaaaaggagcctctcccactcctcctaccaccgaagtggttaggactctatataaataaaaacaaggcttttggaaaataattgcatcctgttgttttcacctcctattttaaaatttatttttgacacctaatgtacatatttatggggtgcaatgtgatgtttc

SEQ ID NO: 1537 - protein, 225 aa, Homo sapiens
MAGLRREYAFKAINQGGLTSVAVRGKDCAVIVTQKKVPDKLLDSSTVTHLFKITENIGCVMTGMTADSRSQVQRARYEAANWKYKYGYEIPVDMLCKRIADISQVYTQNAEMRPLGCCMILIGIDEEQGPQVYKCDPAGYYCGFKATAAGVKQTESTSFLEKKVKKKFDWTFEQTVETAITCLSTVLSIDFKPSEIEVGVVTVENPKFRILTEAEIDAHLVAERD

SEQ ID NO: 1538 - DNA, 1158 bp, Homo sapiens
cagtgctcgaactggctccagagccgtgagttcggcatgcaagagcggaagaaacgcggctggtaccccggaagcagtcgctgcaacttccgggaggtgcttgtgtgcctggtgcgggagctacggggcccagggattgtgtttaaagtagtgcttctaccaacatgtcccgtggttccagcgccggttttgaccgccacattaccattttttcacccgagggtcggctctaccaagtagaatatgcttttaaggctattaaccagggtggccttacatcagtagctgtcagagggaaagactgtgcagtaattgtcacacagaagaaagtacctgacaaattattggattccagcacagtgactcacttattcaagataactgaaaacattggttgtgtgatgaccggaatgacagctgacagcagatcccaggtacagagggcacgctatgaggcagctaactggaaatacaagtatggctatgagattcctgtggacatgctgtgtaaaagaattgccgatatttctcaggtctacacacagaatgctgaaatgaggcctcttggttgttgtatgattttaattggtatagatgaagagcaaggccctcaggtatataagtgtgatcctgcaggttactactgtgggtttaaagccactgcagcgggagttaaacaaactgagtcaaccagcttccttgaaaaaaaagtgaagaagaaatttgattggacatttgaacagacagtggaaactgcaattacatgcctgtctactgttctatcaattgatttcaaaccttcagaaatagaagttggagtagtgacagttgaaaatcctaaattcaggattcttacagaagcagagattgatgctcaccttgttgctctagcagagagagactaaacattgtcgttagtttaccagatccgtgatgccacttacctgtgtgtttggtaacaacaaaccaacatcatggaggtccctggattgaaaaaggagcctctcccactcctcctaccaccgaagtggttaggactctatataaataaaaacaaggcttttggaaaataattgcatcctgttgttttcacctcctattttaaaatttatttttgacacctaatgtacatatttatggggtgcaatgtgatgtttc

SEQ ID NO: 1539 - protein, 244 aa, Homo sapiens
MSRGSSAGFDRHITIFSPEGRLYQVEYAFKAINQGGLTSVAVRGKDCAVIVTQKKVPDKLLDSSTVTHLFKITENIGCVMTGMTADSRSQVQRARYEAANWKYKYGYEIPVDMLCKRIADISQVYTQNAEMRPLGCCMILIGIDEEQGPQVYKCDPAGYYCGFKATAAGVKQTESTSFLEKKVKKKFDWTFEQTVETAITCLSTVLSIDFKPSEIEVGVVTVENPKFRILTEAEIDAHLVAERD

SEQ ID NO: 1540 - DNA, 537736 bp, Mus musculus
  misc_feature (1)...(537736): n = A,T,C or G
acaacaagcaagtacaacagttagtcttgactttcagaatggctggggatattgaaattaccaaagtagaaagagaaacagtaacagaacacaccttttcctgaaagtgtggcctttggtggtctttctgccaccttctctgcataggtgtggccatagagggacagtaggttccgtccagccttgtgcaacaggcaaccaaggagccgttcctcctgcaggggactgtcctcagtcctgcaggtctccaacagttcctcacacaggacacgccactcactctctggtagctcagctttgcagcatagagcctgaagggctccacagacagcatcggccaccccggggggctgagaggcagggtcccgcagggtctgcaatgcctctcggatgaggtccagcagggatttctgcagaggactagggcacaggctggcactgtggtggtcctcgagcagcagctccaagagggcctgggctggccgtggggcctgcttcagaagattccagagcacggagacagcttcggggctgagctgaggggtccttctgtcaggtatactgcccgctgggccttgtgctagtgtttcaaatagctcctagatgaagaatgaagacagggattgtggtgggtcacccaggtggttatgtatgcaggagcaaacatttctatggcatttctttagctagccactcttcacggctcttcacagaagagccaactcaaccattatgaaaatctcagaggaagatactctagtcccatcttactgatgagactgaggttaaaagtgattagcccagttacccaagtcttaccccactttccccaaaatgtatgctggtgacctaaatttaggactacaaaataaggaccaggtgggcaaggtattatgcatacctaaaagcatttcaacttatttttttgaaagaatattacatatcagcttttaactactgttttgaattctgtccacatttaaaggtatagttcatgagatccttctgctataatttgagtgtgcctcttaaaagttcctgtgtcgcaaagtggtggtggcacatgcctttaatcttggcacttgggaggcagaggcaggcagatttctatgagttgaaggccagcctggtctacagagagtgttctaggtcagccaggactgtcacacagagaaaaaaccctgtcttaaaaaaaaaaatccgggggctggtgagatggctcagtgggtaagagcacccgactgctcttccgaaggtcaggagttcaaatcccagcaaccacatggtggctcacaaccatccgatcacgagatctgactccctcttctggagtgtctgaagacagctacagtgtacttatatataataaataaataaataactctttaaaaaaaaaaaaaaaatccaaaccaaaacccaaaaaccaaccaaccaaccaaccaaaacaaaaccaaaaaccaaccaaccaaaacaaacaaaagttcatgtgtcaggggctggagagatggctcagaggttaagagcactgactgctctttcagaggtcctgagttcaattcccagcaacttcatggtcatctgtaatgggattggatgccctcttttggtgtgtctgaagacagctacagtgtactcatataaataaaataaataaacctttaaaaaaaaaagtaagtcatgaaaaaaaagttaccgtgtcagtacccaggcatatggcacatacctgcaatcctagcacttgggaggttgagacaggacagtttagagtttgtggccagcctgggctatgacaagatgttgtctcaagaaatcaaatgcatgcctttaataccagcacttgggaggcagaggcaggtggatttctgagtttgagaacagcctggtctacagagtgagttccaggacagccagggctacacagagaaaccctgtctcaaaaaaaaaaaaaaaaaaaaaaaaaaaaaaaaaaaaaaaacccaaaaaaccccccaaaaaccaaccaaacaaaaaaatcaaaataacaacaaaaatagttcatgtgttggaaacttaatttccgatttcatgtgttagtatttggagacagtctttgggagatagtgaagattagatggactctaatcacatggcccattcccacgctattcccagccttacaagagattccctgagttagcacacctgtcccctctcacttggtgatgccctctgccacgttatggtgcagcaagaaggctcttccagatgctgagcagacacagtgctatgttatttttcatagtgtccaaaccatgagctgaagaaatctgttttacaaattacctagcctgtggtatttagttatagtaacagacatcagaggctcttgctttttattaatattctaatccacacatgtttgacacaattgaatgagtacaatatggttcattaaaaaaatgtttcataagctaggcatagtggtgcatgcctttacacaatactcaggaggcactggcaggtggatctctgtgacttcaaagctattctagtctacaaggcaattctagaatagccaaggatactacacagagaaactctgttttgaaaaaaaaaagtctcatatgtgtattagctctgcctcctgaactagactgttaaaagcttgattctgtatagtctgtttgtatagtcagagtgaaggagaagggaagtgcactgttttccacatctatagatgctgtgcagggatggctttttattaattgcaagtccatgagcccttaaagtcattcaagtcagttctcacacaaatcctaccatgaatatgccttacctggtatctggtcttaagaaaactatgggctggagtgaggatcaaggacagagtgatggcctagaatgtgcaagcccctacataatgctaatacaaattaaaatcaatagatgaggtattaagtcttgagcacttaagtagcaattgatacataactgatattaactatttctatatcatctatttattgcttgctaacttttttctatctatctataatttataaattcagataagtacatctatagcatttacttattaactgctaatttttctctgggggggtggcaatagagacagatttttgctgcatagctcaggctggcctcaaattcttgattattggcatatacaagcatgctgacccagacacagagaacacttagaatctgcccctagaaggttgttgtaatggtcagctataaaatatcagtgtatctgttataaaagtcaactctgtcaaatattagttcctttcttcctatgaattctctatcatctactggtcaacaattcaaatatcttaaattaaacccaagcaatgagttcctaggggaaatgcaaagaacaattgtttgtttgttccaatttgtactgctgggcaatctgctttcagaattccaaaatcaggtaagttgatattcgactaaactaccctgggcctgttttgctttctctgaaaacaaagggcagctaacattgtagagacctgcttacccactgcccccttgaagttgaatttgttgagtgactgcaggtggccctcagtctctcttaccttaaggatggtctctggaatgtcaccttggaggtcttctgacaaaaaaagaaactccagttttctccggatagctgtagaaagtaatttctagaggaagagtaagcagttagaggcgaggcatatgctttgcttaataaatacaattctctttagttactcttatttctgatatttctctaagataaagtacttttagccattcattccctggataaaattttaaaaacagatttgtttttatttttaggtatatgggcgatttatatacatctgtgcaccatgtgtaagcctggtgtctgcagaggccagaagaggatgtgagatccctgagacggagttacagatggttgtgaactgctatgtgggtgctgggaattgaacctgggtccattagaagagcagccagtgctcttaacttctgagccatctctccagccttcctggatatggttttagattctttcctttggaaataaagttggttaaacttgaactctctttaaattaatatgcaggtgctaggaaagtgcttgaaaaagtgcttgccccataagcatgaggacctgagtttagacctccagcaccacatttaaaaaaaaaaaaaggctgggtgtgatggtgcataccgttaattctagctgaattgatgagtgtcaagttcactgagaggcttcgcctcaggaaagagaaaaacaaacaaacagatggacagaggaagacacccaactgacctgacactgatttcgacctcctcagatgcacatgaatcattccatgtctgcatcccatatgaatatgtgcacgtgcacatggactcacgcatgcgcacacacaccagttaaagcctacaatgaccagcctcaaacttcaacgttcatctatttcatatgccttttctgttttgaaacataatcctgttatgtagcccaggctagccttttactccgggtcttcttgcctctgtttccttcctgctaggatgagtatgacaccgtgcttgactccttcattttgaaaacaaatcactcaagttttctatcaggaatttttgttgctatgtgcaaaacagttacgagaaagccttggcgggcatgccctcatagctttctttttatccaaccatgcttttggtattctctatcctttttttttttttttttttttttttttggtttttcgagacagggttgctctgtatagccctggctgtcctggaactcactctgtagaccaggctgacctcgaactcagaaatccgcctgcctctgcctcccgagtgctggtattaaaggcgtgagccaccacgcccagcttctctatcctttctataagagttgttggggaaaaaaacaaaacaaaggggagggaatctaatgtttacttagcaagcatgcctagcacagggtaccatatttcatttccaaatcaaagaaacccatggcttgcatgaagctatgtgttttaaaaataatcttaactggaagtgaaatggtgaaggtgcattttctaattattccaacatcaaattaaaaaaaaaaagcaatacatttttgatgcagaaaaaactatgacaaataaaagaatccccaacaaaggagtattactaatgacactgaaaatccatttactatatcattttgaacagtggcatagtgtatttattacacatagatatgcttccatttaataagcaatcctgtgaacttggggcgtgagggttatttctagttttcctgattttagcatcagcttatcagcacacattgctgtagctaaacctttatacacatgattatacttgtaggcctaaaccacagcacgataaaagaaacagaagataaaagcgaataaagggataaaaccagcatcaatggttcattcaaataataattaaaaggcagcttttggcaggcgctaggagcctggaacactaagctgcttcgagtttctagagcatgaagccacaacaggttctgtggcattccaaaacgcacccggagacttggtccttacaaaagtttataattctccgaacaacaaaaagactcctgtaactgtttaaagaagtggacccctggagctttaagaactggataatctgtctgatattggccaaaaccagaaccattcccaggctaggctgggaaggccggcacgtgaaacccagcacctgatggtattgagcaagcttcccgagaataagcaagctgtgaggccaccagtaagcaagcagacctcttccccagaggggaaaggtcagtcattcagtgcaagggacttcatgtttgtaatgcaagatcctcactcagtagcaaagcctcgatctccccctccctttgaagatgctacggaatctcttctactttgcttcatttttgttctcttttcccctcttcagttctgactcttacttatcctaggtttcattattttacaattttgcttctcttacttgttatttctgctagtctttctgtaatttctctttgctagacaaccacctaaaactctgtctaaaagatacatttaggctgggcagtggtggtgcacacctttgatcccagggctcaggaggcaggggcaggtggatctctgtaagttcaaggccagcctggtctacagagtaagtttcagaacagccagggctacacagagaacccttgtctcaaaaacaacaacaataacaacaacatcacaacagaaaaattacatttagaacaacaacttctggtgtttttggacagttgtggacagcatcactccaaatgatattataaaccaagccaccagggcaaattaatgagcaaataatttccacagtctacaccaagaaagacaacaactaaccaccaaataaaggaagtaacagaaagaaggaagatctctgagctccttatagttcttttcagtcctggcctcagggaaaaatttaaatgtaaacccacgcaccttttctggggccagccatttttctaatacaagaagccagagccaggctaatctctgagggttgatgtctggcccacatctaaaaagaaagaaagaaagactgatttagtaaaatacgagtcttagcccaccctttcccctttgtgattcatgatttatggttcagttttcagtcagcccactttagagctgaactggtaagtcctagtgagaaactctcagttgtaagtaacagttcaacaaaacagagccccataacttccagcttgcattaatgcctgcaccttatccaactgtatcttagctttgtagctgcagtgctgctatgctggctggctatgctatagaattcccgggctcaggcaatcttcctgtttcatctttcagagtgtctggagctgcagacatagcctccccacacctgacttagttttatttttaagtatattcctacagagaaaatcacagtaatgaaggttatctgaaacacacacacacacactgtccttcactgttttgagatagggtttcacactgtagtccaggatggccctgaactcatggccagcctcctgcctcagttgagatgcatgggttaaatttccatactcagctcctaagtgtacttttgaacacagaaaatgaatcaaatataaaagaataaagggagttcatagcgattcacttataactatttagttataggaattcataagccttactttaagtcagtagtttgggcagtagtacacaccttaaagaacttaatataagatctaggatggagaactgtggttctcatgaggcaagaaggggtcatagtgcaaacatacagtagagtagcaaggagtgagaggactcatgtgtagtgtgcagaacttctgtatctttattacagtgggcgtatatcaacccctgaatggataaaactgcatagttttttttttttatagtaatgcacttttcctggttttgctgctttagcacacacagctggaatgagatgtcacaactggggaagctggaaaaagcttgtgccaactctattgtacttcagccttttgtgggtctatgattatttcacaataaaacattttaagtcaatgcattttcaactctttgtcagagcaacaccatcatcagtctcgtaagcaagaggaatgaacagggtttgtcttttggagacaaaatgcagttaagccatcttctatggataataaacaagaaatgatattcaggatccttttggtagtcaggcttaaactcagctgcagagcataattcatggccattggagtacattagatgtaaaatacattacacagataaaacatcagaatattgaaatgtgttccccgtctgctaactttttaagatagtagctgactggggggccataaagactagagtacagccgggcgtggtggtgtacacctttaatcccagcattcgggagtcagaggcaggtggatttcgaggccagcctggtctacaaagtgagttccaggacagccagggctatacagagaaaccctgtctcgaaaacctacacacacacacacacacacacacacacacacacagactagagtacaaacactgaaccactatcttcctctcttagatcctggtaggagcggggatcgcttaccttagcagaatgggacactgcaccagcgcctgtagtatgtcctccaccttttgggggatctctccttgtccccggtgtagttgaggtacacatgcttgtgccaactcccagtctcccctccgcaggcactcacagaaaaactcaaaaagttcctcctctgtagcggtttcctctttcccaaatgggtaactcattttcccagcacagagtgcaggtagatagaaaatagaggcgttacgcgaaatacattctcaattttctcatccgtgaagtaccccctagaaacaccacacgagctgagaagaaacgaaactttagatgaaccaccagctgctggcccgaaaagaaacggcagaacttacttttctaatgactgttttgggtttaatttgacctgttactatctctttttgagagccgtctctttctctaaggggtgtacctcatcttctaccgcagacctcacatataacaatcttaatatttttgctagcctggggtgcagacacatacatttacttccgcattccctcctgaacattttgtcaggctacaaatctctaggttggtggatgccttggtaaggatgaaaactcccttggttagagccttctgttaagacagaggctaaagattaggggatcaatctgggactgaactgtggagccgggaggctgggggacagggatgctccccctagcggggtcgtggacagcaccctcgcaatcttccctgcgccttacactcacctgctccgggagtcgaatgcattttcccgtccagagcagccatgtttgatcccggtcaggtgacaagtcccattgcgaagagtggtggaacgggcggcgatgacgaaagagagcgccactcttattggctcaggagaagcaagatgcaaatcaagtgccgtgtttgtttgaatcacgtgatgccacctgattgctacggggactctaaggaagagttagatccgctagctacaggactgaggactctccctaattatgattgctccttctcgcaacatccacagttattcatttcgggggagctggggccaggaatatctgtgttccacgctccgtacccgccactgttttgttttgtttttgatgtcaacattttctccgtgccaaccagtgatagatgataggttagccacaggaattctggatcttcctgtatcattattctatctaattctatcgtgtgtatatcatatataattatatatccatcgaaagactgaggtcggtacaaaggagttgcaaacgaaaacaaagagtgagcaaaggcttttcacaaatcatgtaatcaagtcagttcttaagtttattagtttttcttaacgcagctgttttaaatacgaaacctacttgacttcttttattttttcaactaaactgagtggttctttttcaatgtattttagtttgagacgctttagttagtatttcccggacattttcaccatctaaatgtgttgaacagtgcaaaggaaacacaaaactctcatcccaaaacgggaatagggcatattgcccaccctttttccaacccctcagccccccaaaagaaccttctctggcccaggaaataactttaaaatgcgattcactgaggaaaagaatttccagtcagggttttccctcctctacattcgtcttgaaaggttccgctcctcgatttaagcaatcactacaaaggaaaaatttaattagattaaccttcgagactgaactacaattcccaaaatacagctgggctaacccgagattttcctgcttctgattggataagtcgccagagtaccaaccaaccagagccccagatgttgctgctcgcacttttcgcgggtaattgtgtgagggtgggggaaactttgaaagttccacgctgctgacctggtactggagttttctgagggggcagttgtggggaggaaggtgtgttcattatcttgtgctccctcttggagcctgtggctgttgataccggggtcgcggagagtcctgcgtgttgagcacgtactctgtaacggggctcgtccctggaacccggacggggtcctggagcttccgacttcctctagggaggcgagtgatgcttgtaaggtgctctgttttattaggaagttttgcgtcaggttttctaactcttgatacttcttcctccgctcttgggcaaattaggcatccgggcaagtttagggactgtcaaacttgtggtgttaagagcgcggaatctggagtcagatctctggattcgaatgttggctcgatcccttggctagttcgtgtgtttattaaaaacatccgaagcatttaaaactagtgtctggcgcataataatggcccaataaataaattaacccctcagcctcctcaaaatagctgggttttgttgcttcactatttttattgagcgcctaacagaaattcagtctgagatgctgtctcctctgtctcgtacgcgcttacgcacacatcaggaagaaagaaaagcatacactataataacgcacagatcagattaaggaagaaataagtgcaaagtgtggagatagcactcgagaggaagtgactggttggcgaagggtttgtgtggagaaatatgtgtttgagtaacctaacctaacgttgtggatagtcacgttagaagaatcacatgtctataatgagtgcctaccttgagcgttatgcaccagctctggagtagaaattagaatcaccgttgttttacacatgaggacaactttgctcgaaagacaagagctaagtaagagatgcccttttcaagttgaaaaaaaatatgattgatcataaaagtttggaagttgtcatatgatggtcccatgaagcattttaagcaatgaaactaacttttaagggaactacttttagtaggattgtgacatgcaacctaatttttttcagaccaattcgagacttctccctgtctatctcagtagcacgtgcacatagcaactacaatacctgtcacataaatgtagttacttgaatatatgtctcttcattcttcaattgtaagtatgcaaaagggaggacataagcttagcatagcatgtgcttaatattggtgaaagaaacaaatgaatagagaatgttatatttggagagtttatattatatttgggagagtagggaaaaaacttgaagccataagcagaatcgagggcaagtagtgagagtggtactgttaaatcagagtgattattgctaaggtctttgtaatttggggttgtaggtgttttttgtttttgttgtttgagggtctgaatttattcgttatatgatgttattgcctggaactaccttatctgagaagcagtaggcaatagagtagcgtataaatgttggtaaattttctcttaaggaaacaaattatccttacaaaattccaactgaaagaaataaagagaatgtatcttggttttgtgtggagagagggaagtagaagatgggggatgaagagagagaggagggttatttattgggctatatatagtgttggtagtaggaatcttaattcttgtgtgtagttttgttcttttgtgtatagttattgattattactttattccatggaataatgagttcctattatttctggaggatattttgccatttcgatgagacacacagcctcttctttgcatgcaatattacagagattacaacagttctaactccctgaagacaaatacttcatgagtctcattagctatctaagctataggaagagcagaatttaattctacatggaacagtaagaagctagtataatgaagaattttattgatatcacttgattgaaatttgttctgactctttagaaaaagcaagggtgaaataagatttgtgattctacagtagtaatgggtaagaggataggtctcaggacaaactgcctaatgaaaccctaaatctgttatttatttattttctgatgacagtgggataactgacatttacacattagctttctcatatgtaaaaaagaacattttatttttattatagtctgtcaagaatattaaatataaggttttggagcatggttgatatttagcagatgtctgttcattcttgatcagtatagagttgccacttggaaatgcatcttgaagattacataaccagacaaaatttgttagtaacactcagtgtcttaagatgttataagtgacggctagtcgtggtaatcaacttgatacttgaccctcaggagaagagggattgtctccatcggatgggcctgtgagcatatctgtggggacgttttcttgactgctagttgatggaaaagggcttggctcagtgtcagtggtccttcttatggtgagcaagctggggaagcgtgcagtaagcagtagtcctttgtggtctcagcttcctttctttctttctttctttctttctttctttctttctttctttctttctttcttccttccttccttcctttctctctttctttctttagttcgttcgtttgttcattcgttcgtttttcgagacagggtttctctgtatagccctggctgtcctggaactcactttgtagaccaggctgtcctcgaactcagaaatccgcctgcctctgcctccctgtgagtgctggaattaaaggcatgcgccaccccgcccggcttctcagcttccatttctgcttcaagctcttgccttcagctcctgccttggctttctgagacaaaggcatataatctgtaagccaaatcaaacttttcttctcaacttgcttttggccagtgttttattacagcgactaaaggcaaactagactactatgtaaatgggaagcactgttaaagtcaagtaatagcaaaagattacatggcctggattttttgaggttgcttactttctctgtgtacccggttgtaagtgtctttcctactttttttattagcattttttttccatgttttgctttgcacatagagaagtttgaagcactttattttgtagggtgttttgtataatctgtccaccatcatttttattgttttcttatgttttttcaagattctttgggagccctggaaacatgagcagcaagaaactaagacgagtgggtttatctccagagctgtgtgaccgtttaagcagataccagattgttaactgtcaggtaacagtcatgcacttttacttcaattttatgcacaaattaattttaattgtaattagtaactgttaaactcgggtcagaaagatttagggttgtagggtgggggttgggggagggcgatgctggggacatgatggcatcagtaaagtccttgccatgtgaacatgaggacttgagctcagatgccagcagagccctaaaaagccaggcccagtcgtgtacacctgaactcccagctccagggaagtagagacaaaagaacttaccaggtagccaatctagctaaaccgtgacccctaagtttgcctcagtggtcagactgcagagatcatttgaaggagcttcctaatcttgacttctcccctccacagacagaaaggaaaagctcatttgtacagaagtgagttaaacagcgatgctttccgtacgtggctcaggttgcgtttcagctggaattttatttaccaaagtccaatatttgtattttaggccgaaaatggtcataacgtaaggaagaatacctcttccttcttttggaggggttcctgagaagtttaatccacttaaagattgttttcagcatcacttgagaaataggacttaactgagattacagcgtggctgtatgagattgacagtcagcgttattatcatgacttactaattctgcggtttgaatcccaggctgagatgctctgcatctgaattctatcccctggcccagcagtgtatctttaggtttggcttcattaatgtatacaacagaagttgcttttttccctttccttttcctttcttttttcccacatgttacatgttccacacgtataataatgaaaaaagtccctcctaagagggaaaacaggactaaagctttaccttaggattcctgtctttagtaaacatatttttcacaacaaataattttggggggattgatatttttctttcttctgttaatacatttagtgatcatgtttatattttaactggttttaagaacatgaagtgttctctcagttgtcaaataattttctttgagttaacttttagcctagaaaacaaatagttttgttttgttttttttgagacagggtttctctgtgtagccctggctgttctggaactcactgtagaccaggctggcctcgaactcagagatccgcctgcctctggctcctgagtgctgggattaaaggtgttgtccccccactatcacgccccccagcttcaaatcctttttgagctgttcttcctgggcatacatttggacctaaactcaagtgcagcattcataagaacttggactggggtgctgttcgtgatgttctttgggcgtcttcccagacactgatgcatgccatctggactgtgtcatagagtagaaagaaagaccgtgcctcacgtgtctgagttaaggagcacggaagcgtgaggaagctcagtggtaggatgtaaaagaggcatacatatatctgcaataaacaagtttaacttcgtcctagaggcaaacagtgacagcccaagttttctgtttttttttttttttggttttttttttttttttcgagacagggtttctctgtgtagccttggctgtcctggaactcactttgtagaccaggctggcctcgaactcagaaatccgcctgcctctgcctcccaagtgctgggattaaaggcgtgcgccaccaccgcccggcaagttttctgttttttatttgcttttaaatttaaaaagcccacgatgaacatttctttttaattattatatctttgctacacatgcatgttaaactatttttctttactttttttttccttttagcactttttaagtctctccccactagaacttatgaaagtgactggcctgagttacagaggtgtccacgagcttcttcatacagtaagcaaggcctgtgccccgcagatgcaaacggttcgtgtaacttaattataaggggtgttatttactttggggggtcagaatagcttccttgtgagaacaatgctctagctaaaatgtgaaggatgaataggggagacaggcaaacacattggggataggtaaaggtggggcaggggagtgtctgccattggggtggcaaatgcaaaggttctgtgggaaggacacttgttcatcgaatagcttaggctgtgccagcggaacacagcgaagaggagagtcacagagaagcagccaatgagagaagctggaggcagcatctatgagcactcagttttcatctccatttctggtacacttcctgtgttaccattattatcttttggaatggttggaagagcttcctaacatgtgccctactttccagtattatccgtcttcaagctattcttctaagccagtggttctcaacctgcctaaggctgcaacccttgaatacagtttctcaagttgtggtgattccccagttagcttcattgctacatcataactgtaattttgctactcttttgagtacctttttgtctgtaaatctccatctcttgttaacattgtagccgtccagtgttctaaccccttagtcatgggcactgggtaaatactcactgttcaaatgaatagcagaggaaggaaggaggcagcttgtggttacagatttggtttgtggttctgattgattagtagctgaaagacccgtgatgcttttctcacacaggcttatgagttaaagacacgaaggtctgcacatctctcaccggcattcctgtctactaccctgtgcgccttggatgaagcattgcacggtggtgtgccttgtggatctctcacagaggtaaaggaaacccatacctttttctataagtaacagatccaggaggaatgtttaattaaaaaaaaaaagggctgatgagatggttcagcaggtaagagcaccgactgctcttccgaaggtcctgagttcaaatcccagcaaccacatggtggctcacaaccatccgtaatgagatctgactccctcttctggagtatctgaggacagctacaatgtacttacatataataaataaataaatctttaaaaaaaaaagcataaattatctcatgaaaaagaactgtgaattaagtccaggtactttgctggcatagtcctgccaggatcactgtagttgctttataaatgaaggtattaaatacatccttgctgactaactagatgtgtctgggattttgtttctttgaattgctttagagagtgataaatattgggtctggggaggtggctgagtgggcagagcccttatgcttgtcccagagtcatgaggagctgagtctgtgtctccagcccccatcacagtcatgaggagctgagtctgggtctccagcccccatcacagtcatgaggagctgagtctgggtctccagcccccatatagaagccaggtgcagtggtgtatgtctgtaataccagtgtggcggaaaggacctgagtctggctcagagcataaggtcacaggagtagagaatagcattaagtgttgatctcagccccctaccccccactcacacatgcacacacatgcgtgaatacacacacatgcttacaccatatgcaatggtgaatattatgaaagagtattaggaaacaattgagtgaattaaagaaaggatctctactttgcagatttccagtgtgaatcaattctgataatatttgagcaagtaatatattaaactatatcgagttagttttgttccctgctattgatagcctttgattctaggaagcgataacttactgtgttatcttatgtagttgtacagtgagctatcctcaagctaagcggcttaaagcaacaataaacactgacttctccgtgtcttctggagtgtctgagcttagccatgttggcaatgcctgcagtcagccacggtgtaagaaacccagagacgctaactcctaggaggcttaccctcgcagctggcagactggtgctgttttatggtattttttccccctaactggggtcttcacagtctgcctgtatcttatcatgatgtccttgttcgcttctgtcagtggacgtggtgatgtccttggcgatcataccactgcttatgacaggttctcttcattgtaagtgagccccaccaagctcacggtcagggaagggaaaattaggctgtgccttctgaatgatgtttcaagagcactgtggctctttactttgaaagctgcattggtgtatatggtgtatattggtgtgtatggtgtatattggtgtgtatggtgtatattggtgtgtatggtgtgtatggaagcctgtaagaattccttgccagaaaagtttggaagcaaagttctaggagcagacatgttgcatgttagtgagtgtgagtgtgtgtgtgagtgtgtgtgcacatgcacacggcacatgcgtcatgaggtgctgggttttgaacccatggcttcaagcattttatgcaatgtctggttcactgagctatattccagcagtttcttacagttctcataatcataatttaaatgatttttttcttaaagataggaaccctgtcttagggaatattttatttcttatattcctagagagatttaaagactgctatgtctagtagatgcctattaaataaatagttgaagaatggataagctaattgaagggctgttgttgtcatgcgttgccaccagatggtgccagaattaaatttttctacaatcatttttgagatgaggctggatcaggtcaattaaggattgtaatattaatggagttgtaaatttacttacacagaaaaaaaattaatctaaagaagggtagccaatgcatgtatttcccccctctctgcccccaccttgtcattttgctaattctgtttgaattcaaatggaggctagaaaccttttgagggtttgttatgatccacctgactggcttatcatctttaataatataatcaataataaattctttatgttctgccctcgcttaggtcatttctagaatcttttgagggctttcatttgcatacagggaataccttagcttacctgcagcctgaatgtttaccattctctgagtttccttctactttatggttacataagaggcacaccgttcttgctttgcttattcttgaactttaaaaatcatatatttgtgattcagccgtatctcatgtcttctttatgaattgcttttctgacttcatgttatttctaagatttttttcatgttatttcaggttgcaagaacataatctttattgctgtattatatttcattttgaaaatatgtcacagtttactctttttgttattagtggacatttgggttgtttttcatttgctactaatatgagtaagtcctgtggatatttttgtacatagctgctggagatagcacatggaagtttttctctggggcaggaattagagaactatctcccagcagttaaattctgttcactgcctatttgtgtaaattaagttttatggccaagctcatttgtttacattttgtgtgtggttgtcttgtgacacaagggcagagtttaattatctgtgacagagaccatatgatatgcagagcctgaagaattttctgggtggccgctgcttgcagcatctgccctggagtggcttgggggttgtagggtatgcacgggggtaacctcacacagccaggaccgattgtcctccagagtgctgggctgccttctactcccactaaccgtgcacagaaattcttcctggctcacatcttcttaccttggtataatcagactttgtccatccttaggatcttaattttattttttctgagcactgaggatcttttagagatcatatggatacctcaaaaagcagcttcatttaggcataatttaaataatctagaatccaagcattgtaaggaaatgtgacttaaataagcttgtagctgtacactcaccaatgcagtcacactgtagttacaaagtcttcgctgttccacttacagtgaattctcactctcatcctaagcccaggcaatggatccattttcgttccctataaatttgcttcttttaagcacgtcacataaatgaacttaagcaatccatagtcatttctgtttagttccattcacatggcatttttaaggtcactgaaggtttaagcgcatattaggcattgcaagagccttatgtgctcttaactgctgagctatcttcccagtccaggtcttgaggtttttaatgttatttacatttgcagagtataatagtttgtatttaatatttattcatatacatttaatattaatttatgtgaattggtttaaaattatcaaaatagtatgcttaagaaattctattgatgaacattgaatgaatcttttaggtgctttttttccttaaatgtttttaaagttatatgtttcttaattttgtgtatctttaccatcatttaagacatcatttaacaaatcactccaaagcttaatggctaaaaccgtatttattttctcatacagattctttgggtcaagaatttgagagcagcttagttgaatgtttctggttcagatctgctatgagattacagttagagtattggcctaggctgacattgtctgaactgctgccttcgaggtggctcacttacatggctggggagttctttgccatgtgaacctctccaaaggagtattagagtgccttcatgctgtgacagctgacctctcgtgtgtgtgtgtgtgtgtgtgtgtgtgtgtgtgtgtgtgtgtgtatgaaccaagggaacaaggtaggcatggcagtttagaagttatatgccagcatttcttatatattctgttagacatacagacaaatctggtaatgtggaggggaccacaaaaggcacaaatacaaagggtgaggatcactgggtccatctgaaagactggctgtctactagtgtgcatacaaatgtatatatgcatttatatgtgcatataataaaaaactccttattaaggtactaggtctctgttctcagagacattatatctggcaaaatttctaaagcggcttcctgtggtgatttgagtaagagtgaccccaacaggctcatatatttgaatgctcagctatcagagagtgaccccgtttgaggattagaaggattagaaggtatggccatggtggagtaggtgtggccttgttggaagaaatgtgttactggagtgggctttgaggtttcaaaagcctatgccaggtccagtgtgtcttggctttcagatcaggatgtagctctcagatacttctccagcagtatgcttggatgctgccgtgctccctgccatgatgataataaaataaatgcctctgaaactgtaagccagcccccaattaaaccctttcttttctaagagttgctgtggtcatggtgtctcttcagagcaataaagcagtgactaagacacctcccaatgacattgtattctcagccctggtatttgtgagtacagtgagatgtcatggctgtggttaaggcatgccgttgccatgattaaggtgtgtcatacggctcagcggctttcacagtcctgtgaccgttgttctcccactgatctgaggaagacagattcaaagcatgggggatactgacggtgtcgctggtttggagatgaagtgggtatataaccaagaatgcatgcggccaccaggaacgataagcacgttccaagctctcagaggaacacaagaaagaaacctcagacctagagcagaagcacagattttgccaacaacctggttgggcctgggagtggacgctcagttttccagactggagcccggtacagttgagaaccttgattttagccgtatgagatcctgtgccgagagttctgttcagcccatcaggactcagacctctaagataatgaatgagtcttccttcaggcttctgaatctgtggtgattgtttacagcagtagacaagtaatagaggtgtggagcgtcacggcataccacagtcttgtttctcattcagaggtctggaagggattgagggagtaaatataaacctgggaacgttctcgtgtcatttttatatgctcttccctagctttaccttttaatctcagaatgtgtttatcatccattttaacttctgtgaactccctggatctggggacggtcatttacatcatcagttacagcactgaggtaggaagtagatagagtcaaagcagtgctcacgcagagcctcagcaacagcagtcctgggagccagggcctttgtcggattgcctaaagaaccaggaggttttacttgtggaatatgtaaacaagtaattctaaatctattataattgaaaaggaacagtgaggataaggttgaagcctaaactttagaagtgtgtattatgtcaatgattatcaactatttttttttcattatcataaattaaggagcctttaatcccccccaactctcttctatcttcactgtccatggaaaatctaatgttatagatatgctatgcatttgtttctgtgctgtgtgtctactgtgcaaatgtaaaacaataagctactgttttcttaaaaacggagtcttactcctggggtcaatactgtccttgctaaaagtccacaagatagatgttattgtgagtaggtaaggctagcgttgtatttagaggtgttgtcttgccaggggctggcaggatgtctccatgggtaaaggtgcttgccaccaagtctattcctaggatccatgtggtaggaggagagagctgactcgtgctggctgccctctgatctccatacacactgtgatgtacccctcaatcaatcaatcaatcaatcaatcaatgtaaaagaaactttaaaaagataccatcaaaagatagtttcattttatgatctagggtttatggtctagggcaatggtccaagcttttgtcaattaaaagatgccaagtctgtgtatcttgattcacaagtacctctggaagaccaacctgagataatttgagatttgagataagtggataaattctaatgttccccaaagtgaaccagaatcctgatttaacatccccatattcttgtgggtaaaagtcacaactcaggatttctttttcttctcattgctaagattagcgtgtcctacatggtcacaggaggtggtgagaggaaggcttgtaagctcagatacctgcagagcctgcaataggaaggtgtgagacttacgtgggtcattagattactgctgagacctgtagtaaatcttaattttttttcctgtggacctacagatctgtgaaaataggttttgtcttgtccagttacagttgggttcggtggtccccttgtagccgtagtggtnnnnnnnnnnnnnnnnnnnnnnnnnnnnnnnnnnnnnnnnnnnnnnnnnnnnnnnnnnnnnnnnnnnnnnnnnnnnnnnnnnnnnnnnnnnnnnnnnnnnnnnnnnnnnnnnnnnnnnnnnnnnnnnnnnnnnnnnnnnnnnnnnnnnnnnnnnnnnnnnnnnnnngtcacatagcatgttcaggaaagtgctgttattggagtaatgatttgtcttcatgcagtttgatttttactgtgcaacttggaatgtctgtcatttctatgtcctgttttttttccttctctggtcatctcttttcacatacacacacacacacacacacacacacacacacacacactagttgtcagtatatagtaatggtggagagagtgttggatataagcttttacacgctgatggttgataaattaagatccggtcttctttcacaaggcttgattgtagcctttctgagattcaggtattaggattcagagagatagttataaaatgaattatgtaggtctgaagacctaaccatatttctgcataattcttaagcaaatacagacaagtacttagatgcttgcccaggggaagggggttgctaggaaaaaaaaaagcagctcccatgagctgtcttgtttcaggtctgagctagaaaagccttagttttttcttttgccaagtagtggcttggcagagtgcactgtcttgctgccccaatcccagatgtgcagagttaacttggtaagatttggggtcctagctggtctaggctttatcttctttttcacccacgcaatcaaactctaggatggagtgagtgatagtagattttctgttatggggaatagtagttttcctcctcaaagtgagtcactggttttttgctatgttgctactgatatttgaaaggcctgcactaagactttttctttagtattttttgttgttgttgttgttgatttttcatggagaggggttatggcatcagcttaactatgtgcaactgacttttatcttctaggtatttctgtgtgcaaatagttcgttcactctgagtgtccaagaagcaagtgactttgactgttctgacttggcaggttttctctgtaaccatcactgggttgaagctgggaactgaacacaacttgaaatcttgtggtttggatggtagaattcagggctaaactgtctgaagctaactttattgatgttgagatattttcccccaatagataaatctgaaaaataatgaaattttactcctggcagtccataaacacacacacacacacacacacacacacacacacacacacacacacaagaaggaaaaatatatgaagaatatactagaaatagttactatagtttaattcaaactcaaacgagccaacaagcccaggtatcactacccatgtgacattgtgtttccccagactgtattaaggtcgcacatgaaagcgacaggtcagagcaaatgagactttacttaatctttttttaggtatatgtttttagaagatggaatgaatagtaaattaatacagtatattttcatggtacttgatactttattgaatattttcatatatgttatctatattacattccactaagatcaccatgcatttagcagttttaatttcattaaatcagagaatatagccaagacctggcaatagacaaaacttgtgggcagacagcctgctcccccatttcttcgtcagttcacactctaacatgcacggatttattcagtttcagaattcatgtgcaacttctactgactggagtctcttttgtcacgatacccaatgaacagtctgatttgtgttgactttggtaatgataaaagacttgtggagttttcgtgatcaaaacaaactgttcagtcttggtcaatcaaaggaagaacgctatatatttaaagcaactaaagaatatttttggctagatttgttacatacctttaatcccagcactcaggaggcagagggaggtggatttttgtgagttcaaggtcagcctagtctgtatagtgagttctaggctagccaggactacaaaatgagacccctcttaaaaaaatttttttaagggggcaattgagatggatgagagagtaaggtgcttgccatgtgagccaaagcccaagttcagtccccagatctccagatcttcaggtggaagaatctactgcctaaagttgtccttcgaccttcacatgtgggctatgcacaatatagaagaggaggaggaagaggaggagtaaagagtaataatactaatagtaacaatgatgtagaaataataagaaggattgtaaggtgtaaatattgaaaagtgtaaatagtatgatctaggctaatagctagattctgttgcaaaaatgaaatccattaaggatttctttctttagaaaatctcatggaggtaaagatgttatcagggaaggtatagcctcaaaaatgaaggacttcatgcacacaggtggtctttgagtgtgtttgtagcactgacaaggaactcaggacataacccatgctagataagcactttactgctgaacggcgtatcgagtcgtcgtttccatccttttccatccttttccaatgctcattctgagataaaacgctgcctccactggccttgaactccctctgtagcttagatatgccttgattctgcctgttcagcttttcaggtagctaggattaaaagcctgtactaccagcctgctaaaactttttttggtttttgtttttttttttgtttttttttttttttgttttgttttgttttgtttttcgagacagggcttctctgtatagccctggctgtcctggaactcactttgtagaccaggctggcctcgaactcagaaatccccctgcctgtgcctcccaagtgctgggattgaaggcgtgcaccaccacacctggctcagcctgctaaaacttcttgattagatagcaatgcctgtgtcacttcctgggagtagtaaaatttgatttcataggagtttaaattacatatataggaatgaagttattgctcagcattagaatgcttgcctaaacacacagacccctgagttcaatccctagtaccataaacaaataactaatttgtgtctagtgttcatattcatgaaatggtagattatgtttacaaatgagaaattcaaaaggaaaatactgtacatattaaactctagaatggtatgtatgcagaattcttgggagaaatcatatttggtgcctttgacttactttgaagtacaaaaatcttctaatggagagatggacagacagattagtatagcagaagatagcattgtaaatgccataaaatggtaattgttgggtgcaggagtagttggacatttcttgtaaaaaaatcttttagcttttctattttatttattgttaggcatctgacaacaaagaagttgatgttagacaggaaaaagaacatttcagatggtatcagattcgctgggttttatggaaacttgtttgagtctattactataccatgtgctgtaacagaatattgaaggttgggtacttttatatagtcgagaggtttatttggctcagaatctagtggctagaagatccaaacaacatggctctagcctgttggcaagaaccacctggctatgttacattatggccgagaagcaagaaggaaaatactgtatgcagaatgggcctttggactaagagggacaataatcccttctgtcctcctgtctgacctaattatcttccatcagcctgaccctgttagtttccactacctcaaacaccagtgaactgaggacaaagctcaaagggtgtgagcctttgggagagcactcaggctgtacgagataggatctgtagtggatgaggagtgcttatgagaactcactggatcacagaggtttcctggctaccccaccgcaaagactgtaaacttgaatttacggaggggcacacctttgatgaaaagatgagcagctgggtgtggtgatacattcctttactctcagcctcaggcagaggcagagttctgagttccaggactacataggaagttctgggctagccaagggctacacagtgagaccctttctcaaaaaataaaaattaataatcccagcacttgggaggcagaggcaggcagatttctgagttcgaggccagcctggtctacaaagtgagttccaggatagccagggctatacagagaaaccctgtctccaaaaaccaaaataaataaataaaaaataaataaaaacatgataagaaagacgggacagacaagctctgtgttactatgccatatctactgaccctgtctgagtgacaggtgactgtaccctatgctgcccagcagtcaattcttcagtagtattttcacaatgccatttgtcaacaggagaacatacagggagtgactgacacttctagcctttctcaattataatttcacatttggcaacaaagcacagaaggagattgactgagtgaccatattttcattgctcccaaggatatatatcctaattatccacctataagagaaaagttagcatgctacctgcagtgggggtcttagggcttaattctttcttccaaccaaggttatgggattgcttttttttttcagcaaattctaaaataattttctttgtccagcttacaatgtttatacaaattttatatacacatatataacatgcactttgttttttagattacaggtccaccaggttgcggaaaaactcagttttgcataatgatgagtgtcttagctacattacctaccagcctgggaggattagaaggggctgtggtctacatcgacacagagtctgcatttactgctgagaggtagagtgctttatttttctattataatgctttgcttttatagctcctgtgctccatgggacatttacagataggttaaaatttattttaacttttaaggacaaaggatgctaggtactggttttagaggaaatttcccttttgaaatcgatccaggaagcggatcaggtttcttctcttatgatacaccatggctacttttttggactctttgaattacatcattatgaataactctcttctttatttctctctgaatagtagtagatcaaaaaggacctgatgagttatggcgtttaatacagatcatcaacttgacaggatctagagttgcctaggaaatgggcttccacgtagacctgtgaggactctaggactctgggcaggcttgtgaaacactgtcttaattaggttaactgaggtgggaagactctcaaaggcgcgtggccccactgggtcctggactgaataaagaggagagagagcaagtgtttaccattccctgctgcctgactgtgggcgggatgtcctgccgcagtggactgtaccctgaaccgttctccattgagttgcttttgtcaggtgccagccacaggaaaggcgagtgacatacatgggaaaggtcaaagtgtaggtgtctttccctttttgggccctgtaagctttccgagcctccttccttcctcccttcaagagggaaggtttcagtttggaggaaataaccaagaatcactgcattcacagcggcagcctccgcctctgtttgtgaagacgtgtggttgtggttcttttctttgcatatggttttacttatattttggagttttcatatttacttatttctccatctcttttctgccttcgtgtagtattagtacttacatcagaggcagggtgcaaacaaaacaggtacaattttagtccccttacatttatgttaatatatgttacataattatcaagagggttgctttagaataggggtgaaaacctgcactgtttttagtttttattgcattcttcatatagcccgagaaggggcaaggctgctctcacacagggtgcgtgttgaggtctggtgagggtaaggcagaaccggaggtgtagtgcctttggtatcgctgccttcaggagtctgctgtggtggatcatgcacggaacctgctcttcagggtctggccatgtgttatttgtgctgcggtcagtctgcttgaccctgttagggtcatcagggatggatggtcagcgagttatgtaagctttctgccacaagtaaactgaacgttcagagaacagcagtgtgagcaaaagtaggcacacctttctcacgtgtaaagatctgtttcagctgttcagtgatggaaggaccgaaagctggtttgtttttaggcatccgtattcattctgtgtttacaatagtgggactagaaaaggttaggagactttcatcaggaaaatatactttaattttttttgtctatctgtctatctatctatctatctatctatctatctatctatctatctatctatctatcagagacaaggtctctctacatatccctggatatcctgcaacttactatgtagaccaggctggccttgagtttacagagatttgcctgcctctgcctccagagtgcagtgctgggattaagggcaagcatcactgggcggggaggtttacaggatagctacttcttttcatcttcttacctgcagatgttttcttgatccacagtaattcccctgcagcgttctcactagaccacttttatgtagagaatgggaaagcaaggggaggagggtctctagcaatcaaggtgagcttgtgagggcttgttgctgcttgaataaaagtgagaccaaagcaacagaggaggaacttggaggtgggttgggttggtaagtcagtgtttaatcagagcccaggttgttctgcacttaagaagagattggggggtggggggtaggagactgaaaaggaatttgaaagagaggctgagatgctgagtgtgcagggttatggacgccctcttctggatgattcagaaaaatgtctgtttttatttgttttacctattagacatctgcgtaaaacacagtatggtcttagatgccataagtttacatacagcttgagaagatgggtaagcaatgtaatctactgaccagatctgtattccagcctatgggcatttgacagctatgggaactgccatccatatgaattgaataaccattacattatgtttattagagacaagcaggaaaagatggaatgggcagtcagcatgtagcaggattacaaggagataatgcattcttgagatttggcaggatggagagaaacctccaagtgtcctaacaatagctgtatatataatttgtggcttgtggagttacattgctcgaaggatgtaatttataaccacggctaaagattaactcagtgtaaacactaagtaaaaggaaaagctggtttgcttatttctcttatcctgaagaattcattttataagtgccaatgtgggttggttgatagtgcattattcaggtttatggttgaggagtgttgacgaggttaaactcaaaggtcacacgtgctttgccttaagcacggctttaacattcttgtttcagatacatctcaggaagagcattagccttgtaggcattccttacagctattttgattttgttatttatttatttctctactatctacctaatctatctatctatctatctatctatctatctatctatctatctacctacctatctatgtacctatctattttagttcttgattctgtcaagagtatgtgcatgcagttgcatgtatatatatgtgagtacctgtgtgttaatgtgtgtgtgcacgaatgcacatgtgtgcaatcctgaggacccaacagacagacaaccttgggtgccatttctcaggtgctgtctacctccttaaaaaattttaaaaaatgttatgagtgttctatgcatcacttgtgtacctgatgcccgaggaggtcagaagagggcattggattgcctgggacatggaattcacatggttgtgaactgctatgtgggtgctgggaattgaacttgggtcctctggaagttctgttagcaagcactgctaaccactgagcaatctttctaggccccagctcctccctctttctttctttctttctttctttctttctttctttctttctttctttctttctttctttctttctttctttctttctttctctctttcttttttttcatggagataagatctcagtgggctggcatggttctccagggagccccagggaccagcttgtccctgcttccccagctctgagattacaagcctgagctgtctctccttgcttttttccatgagttctgaggatcggacccaggacctcatgcttgcaatgcaagcactgtgccagctgagttactgccctctctctcctttgtgtttctgacagtcttgctgtgtagctcaggggaacccatgcttctccctctcctgtgtagtgctgggattaaggctgcaagccacctccagttcttagtcttttagttcttcagttctgctgtcagtgcaaaagcggctgtaataggaagtgaacaaatacatggtcaaataggagtttattcacagaaacagattattcttgtttgtgtctacagtacatagtatactggtctatcctctcatttacctacttatatacatttataagattgcaaatagttgtttctgagggcattaataatgccatcacctatacaacttctggtcttttgttagtaattaaattttttcctgactatagatcttttcttctcctttacatgcctattaatgaaaaaaatttattttatgtgtctgagtgtttgcctgcatgtgtatatctgtgcatcagtccatggttctcatggaggatattggatcccatggaattgaagttacagatggctgtgagctgctatgtgggtgctgtgttgaaactgagtccttaggggaagagcagacagtgctcttaatggctaagccatttctccagccctttcctaatgattgttagacatggctatgttagatgctgaactttaatgtacatctctgaggtgttagattttttgttttaatatatagttaagattattttgatggtctttgagaccgattaagccttagcactgtgaagtccctctgaggactcccacctgttacccaaggtatcgtgagatctctgtattccttgtgggtgtgggaatatgcactgttttcatcttgtgtaagtgctggaagtgtttagtctcccgttgtctcctggttcatcctgaagcgtttccttccatacattatgcatattagctctggagnnnnnnnnnnnnnnnnnnnncccccccacacaccgccaccttttcttttctgcacgtgacttcatgagttctaccagcttagctgtttcatactctgatctcatctttgggtccaccagactcacattggcttccccttttgtgtgtcgtagaatagaaagtgcctctggtgtgagcctggggcactttaggttcctttactagtttcctttctcaggagggtcacagttttgaactattgtttagtgtgtgaaactgttctttcagattattttgtctgcttttctagttgatgctatcggggcaattcccaagccagttaatcttttgtgcacagaaggcaaaatctccctattatttatcttgaattcactccatattggctttatttcctagccctatattgaaattgattttcaaaactttctccaactcaatagtatataaaatgcagccatgcgttgcttagtggtagtggtatggtttggggactggatgactaagccagtcagtcctgtgactctgttcttgtgtgcttacacagactgctgtgtgtgttcatcatggatgtagcctctgcacacaatcaaaagatgtggtgagcagaagcagtgtgaagctgatgcattgtgttttccagaccttaaaaatgctgtagaggtaacttacaatctgaagtaatgattgctagcagagtgagcacaggcagaaatatcaccaagtgttgtatactgtgcataatttatatactgtgcttttatatgactggtaacatggtaagtttgtgtataccaatattactataaactgactaatgtgctgcccttgtacagtatgtttgctgtcacatcaccaggaagtgttgactctcagccctatcacacagccaccatgttctccccaacagttcctgtcagttggcttcttaggttttatccctgtttctgaccatgttagtctgtgttgctggtccctctccattttgtcagcatataagccttggagaatcccggactcagttttaggatcttggtcttcctccatctgtcctcaatctctcaatgcactctcatggttttagcacatttctttatggcagaagggtcctgtgttcatattctgagctttcccacaagctccagattcatatacatttgccacttgacataataacatattacagtcacatctatatatgtggacagcttgatatacctgaagatgaattctggatttccctgtttaaacacacacacacacacacacacacacacacacacacacacacacacacacacagagagagagagagagagagagagagagagagagagagagagaggaagaacactacactagtaactacaatcctgattgaatcactactgttctagatattcatccaatcaatcaagttcttccggttccctgcctgaattatactttaaatccagttgctcctgataatctgaggtatcatctccctaggtgaaggcaccatgtttcttgtgtggacagcagttatcttgttttacccttgccctttgaagccttttccccatgtgacatctagaaccatctctcccctcccctccctcctccctctgtccctccatctgtgcgtgcgtgtgtgtgtgtgtgtgtgtgtgtgtgtgtgtgtgtgtaggcgtgtatgcctatgtatggaggctaaaggaggatgttgggtgtcctgctgtctcattctttaacttcctcctttgatacagtttctcactggccttggagctaggctggcagccatcaaccctgagacactcctgcctgctgagccatctccctagcctcttgagcagaccttcaaaaagatttatttattattttgtatcttatgtgtacggatgttttgcctgagtgtatatatgagcgatgagtgtgtgcctggtgcaatagaggccagaagagggtggcaggtcccttaggtctggagttaaggatcgttttgaaccaccatgtgggtgctgggaaatgaattccatctactgaaagatcagccagtggtttctagcactgagccaccccccagagcaagcagtcttttactttaaaaaaaattatttttatttttaaagacacatttgtgggatgtggtgactgagtggttaaggtaatgatctgttaaaaaaggaaacctgatggggtcaggtcggctcccacacttctcatttttcttaataaaaccccaacagactaccacagatctgagggtctgaggggaccttgatttctgcctggcgctctggcttcctccccttcaacctttcaggcttcttcctgctccttgttccagctacattaactgttagggcactgtagctggcccctgatgttccagctacattaactgttagggcactgtagctggcccctgatgttccagctacattaactgttagggcactgtagctggcccctgatgtgtttgcttttctctccttctggaatgtcttagggcttctattgctgtgatgaaacacatgaccaataaataaataaatagataaataaataaatatttaaaaaattaaaaaaagaaaagagaagaaagaaagaaagaaggaaggaaggaaggaaggaaggaaggaaggaaggaaagtgagaaagaaagaaagaaaacacgaaaactgaaagccccaaacaaacatttccacatcactgttcatcatcaaaggaattgaggacaggaactcagacagggcagggacctggaggcaggagctgatggaggggtgctgcttactggcttgctctccatggcttgctcagcctgcttttttacagaacccaggatcagcagcccagggatggcaccagctgccatgggctgggttctcctccatacatcactaataaacacgatcctttccaggctggcccacagcccaatcctatggaggcggttccttaactgaggtttccttctctcagaggactctagtttgtgtccaagtgatacaatctagccagcacacagaatgtaactttcttctctcctctgctcgtcatttcctttattgggggtattgtgatgtcatatactcaatacttatggtagttagtagtgcctggcctatggtataggtcctcagtaaatctttttgttgttgttgttgttctttttttgttttgttttgtttttttgagacagggtttctctgtatagccctgggtgtcctggaactcactttgtagactaggctggtctcgaactcagaaatcctcctgcctctgcctcctgagtgctgggattaaaggtgtgtgccaccacacccccggcttctcagtaaatgttgaatgaatgaattttagatgcatcttttcaaagaagtgcctttgctaaaagatacccactaggtggcactgttttcagactttatgtaattatgttggtggcaaagatgggttttctgttgcttcccctgaagaacaagatcttgtgaagaaaattgtcactggatactaatgggattgataccaggcatttagaaaagcttcactgataattattttgatttatattttttaaaaaagagtttccccaaataaaagtcatttggagaagcctttagaaaattgtaacatattgactgatatgttgctgtctactcaatataggtacttagcatggcaaatgtgagtaacagtagcaatataggtacttagcatggcaaatgtgagtaacaatagctctgatccatatactgactatcatttctcatgagcaggtttaatagaacaagtaaggaatctcattacctttcaccactcaagccactggtggaaaaccagcctagtgttgcactgtggccagtaagttaggaactctcctctgctcctagcaataggctatccaaactgtgagacatcctcaagtttgcagtacccgtggctgtacccatcctattgaacactggtgtcttccaagtgctagagctccagctgccttctctactgagcactgagctcacatcatagttacgtcactgctggcagccaccaccaccaccaccaccaccaccatcaccaccaccaccatcgtaatcataaaaatgacatgcttctacaaaccctcccagtctgcccaatttgcatggtcaatagcacatcattttttttttgctttccttccttcctccctcnnnnnnnnnnnnnnnnnnnncctccctcccttcctcacccctcccttcctcacccttcccttctctctctctctctctctctctctctctctctctctttctttctttctttctttcttttgagacagagtttctctgtatagccctggctgtcctggaactcactttgtagaccaggctggccttgaactcagaaatccgactgcctctgcctcccgagtgctgggattaaaggcgtgcaccaccactgccctgctcttttttgcttttcttacttcctgtccttcttccctcagtccccatgccttgtcaaacacgccttactcggatacccctttaaatactatttttctcttgaagcatttttacctcttcttattgaaccaaattatatatttttcttttcagttgactgaaaatgcacttaaaaagttcttgactgtcttcatttttctctttcctgttttaggtccctcccttgcttctgactatagcatatttagggatttgttttgtttatctatttaaagttctcagcctcttcccagagccctttaactggggatgaagacactactcttttgttctcctgtgtctcttatgtgaacgtagactatgggtggcttcgtgtttgcagtttcttttccagattccctggatggctaagtagggctgacgagtcattgcaattgggagacagttatactccaagagttttgtttttcagttttatatcttacccttttgtaatttctagcgatgcccttcgtgcctctttctgctgaacgacgctgtcctttatgctttgagttatcttcttcacttgacctgccccacatgatgaggtttagcctcggggtctgaattcagtattcagaaaatagctttttgttaacaagaagtaactggatagcattaatttggttaaacaataatttcctatttaccaaggaactactaaatagctttaaattttaattgagaaagcatattttctaggaagagacaaggcaactgagatatgttattattaggaaacagtaccatacttattgaaacagactttgttcattcaagcaactgaaagctttttctaacatttctaatatgtaaaagtagctgctatgaaaatgttatctgtaaacattatttccagaaataaaatcttgggaatattgttgcttgttggaaatttgatgagacttagaacccttgatagccaacctctgataattctcacagaggccacgtgtattccaaactggtgttttgagccttttgcttacgcctgacatacggatacgtcttagtactttcccatgtggagtgtgttggggactcagcagtgtctctctcttttagtattcactattctctcttgtatgctattcccttctctcatagactggttgagattgcggaatctcgttttccacaatattttaacactgaggaaaaattgcttctgaccagcagtagagttcatctttgccgagagctcacctgtgaggggcttctacaaaggtaggcggtttcacattactaaaacatcttatattttagtaatgctttgaaagttttctcctccccgttttcagcttcttagtaaaataattcttatataatggagttaaagaaataataatttgggctggagagatggctcaatggtttagagcactgactgctcttccagaggtcctgagttcaattcccagcaaccacatagtgactcacaaccatcagtaatgggatccgaagtcctcttctgatgtgtctgaagacagctacagtgtattcatatacataaagtaaatacatctttaaaaaaaataataatttgtgccttcttcattcattgtagtttttttgaaatgtttctttaaaatggaaaaaaaatcagtgaatattttagaatctaagtagcttattaattataagttgttttgttagtgaactacctgtaaatgtggcagcttagaacagcaaatacttattttctggcgagtgagcttctggaagtggctcagctggctctcctgctttgcttgttgtccaggatagctgttgttttgttgaccagtgggctggtatgcctgtacccaagctcactcgtgcaccattggaaggcgtcctttctttacacaaggaaagtgtagtctttcacccccactgtctggaataagagcatcaccattttgtcatgagcacttgtcacatagaccaactcttgtgtagtatgggaaggcatttatgtagaaattcataaaaagataggacacaccaggataggggaataagaggaggctgttttagaggccgttttagactggctacacaagtagctttcctgtaaaattacagcttttgtagtattgtagggcaacatgaaaacactgttgatatttccagaagaatgcaatgtgataggagtggtgaactaagttatgtgtgctgaattttacagccatcgctgtgtgtgtgtgtgtgtgtgtgtgtgtgtgtgtgtgtggtatgtgtgtgtgtgtgcacacacatgcagtgcatgagcaagtgcatgtgtgttactgggcttgaacctagggcctcgtgtgtcaggcaagggctgagctgcatctcagcactttttttttttaaaaagatttattttatttatttgagtacactgtagctgtttccagacaccccagaagaggacatcagatccttttacagatggttgtgagccaccctgtggttgctgggaattgaactcatgacctttggaagagcagtcagcgctcttatccactgagccatctctccagctcctctcagcacttttttaagtttttattttgataacatacagactatgttatccagtatggttttgaacaactcccactgtagcccagtttagccttgaccttgcaaacttctttctttaatttcctgattaatgagggctacagatctctgttaccagagctggctcgttgttattttaaagctgattaaccctttcagcatggtggtgttgttgttttaggtttatttattttgtattttatgagtatgagtatttgcctgcatgtttgtgtgtataccacttatatgtctggtgcccttggaggttggaagagtgggtggggtcccctggaactagagttaccaatgggcgtgaaccctcacgtacatgctggaaaccaaaccctggtccttttcaagagaagcaagtgttcctaactgttgagccatctgtctctccagccccttcactttttaaagtcatgtctttgaagtgacttacagatcttcagggttaggcctgcctgctttcctgagttctaactccaaaagcatggctgtcctttccccacctctgtctctgacctggagaacaaccagagtcctaagcgtgtttgctctcaacctccaggctgtttgctctaacgccctcttcccctcacagatgtttgcagacctccattgcactctaagtcttcactggctccctcctcccagcagctgccaggatttacagcttgcccaacttgtgttttggcttttctctcaaaccctaatacagtgttcttctattttccttctgaaaagaaaaataaaaaagagttcgtgtcttacacttgtttgttattttacaaattctactttcacaggcttgagtctttggaggaagagatcatttcgaaaggagttaagcttgtgattgttgactccattgcttctgtggtcagaaaggagtttgacccgaagcttcaaggcaacatcaaagaaaggaacaagttcttgggcaaaggagcgtccttactgaagtacctggcaggggagttttcaatcccagtaagtgtcccttttccttcttttctcttaaggtcatgaccttacagtatcagatgatatacttagggaagactaaacatctgacttctaaagttggattgctatggcaagtaactgctttcgtaagccaccctctctgctggttatgtccccttttataacatgacccgggacagacttaagtgtttctggcggttcccaccgtcccttccttcattccttctcacgggttactcattctgtgagttctgtgtcacgtctgtcatgctgagattactgttacgtgggacgactcgaagagcggcctgggtctgtttctgcgaactttctttgcagcgacggtgtatcctgtgggttttgtaacttagatcttttaggctctgttcatgggttaccctgttcagcgctgttttggtttgtttccaatgggcagaggtcaaccatgaatggaaatggcacagagaataccttaaaggagctcttggaatggttttctgtggtgggcattgtgatcaggaagtctgaggggtgattattagggttggagatgcacagcagacaacacagagatgtatattaagttacaccccactctgctacatgtgggaggctgaacttgttctgcagcctcaggagcattgggtattactatgcttgctttgatttcttccagacagcatcctgctgtccagcccgaccgtcctccccccagaccctcttgctttttgccttagtgctagggttacaggtatgggttaccacactcttccaggctttttagtcttagccatgttcccacccagacaaggaaattccttaacctgacataaaatttgcttgagactttatggttcttatttgttttggagaaattaagatctcgtgtctttgtatcataaagaatatatacaaattatgtgagtcaccatgtagcctttcatttgtaaagccaagcgagaagtcggagaaagttcacacacacacattctacatattttcatgactctaaaatttatagtttggattaaaatcagatattacagagtttatcttgagaactgttatctttatgtttttaatagctacttaaaatgatatatttgaattgttcctggtcaagtagaatagaaaaatttaaagaatcttttgaagagatacttaataggaatttaagatgagttgcttacttatttttactaacttacagtgttgcttgacctaagcctctgcaaaatgtgaaaagtaaccttttaaaagttgttttcctttttaaacagcagttataggctgatgttttgcaattcactaagatagtttatctttttgagtaagaaaaaaaaactctactctttttttgttgttgttttagtagagctctctgaaacaacaggtgtccggtgtctgagaagagctgggcagggttgtgatctggtggatgcgatgttatttgtccctgatccggatgctcctccctaggctcagtgctccaagctcaaccaatatctcatggagttaggaggtgcggttgcctttaatcctaggaagtagaggcaggagtgtgtcctgtgcgtacaaggcaagcctggtctaaatagtgagttccaggccagccaaggctagatggcgagacgcttgtcaaagatcaatcaatcaatcaatagtaaataggaggaaatataggaatctgatggtgtttttgtattacttcaaggcactaactcccatccctactatttatgaaatttttactaaagcaagaattttataattcaaattattttgccttgttatttgactagctctgattagcctaagctatctcacatcaaagaattacttaaagaaaggaatgctttacatttttgtattttgctgaaaattcatttttatggtttataaaacttcatttgtttttatattttaccacttttgtttgttttgttttaaatcaagtaatccatgactagcactgtttgtgaacctggcatttgcttgcttcataagttcaaagtttcctttccttttagaaattattttatattttgtgtttttcataatatttaaaaattttaatgtttagatttttttttctaagaagcatgaggttttgtttttttatgtttttcttgatcaaatttagtctttcaagtggcactgttcactgctttctgggcagcctttttctgattggtgtgctattaatgtggttactgtcatcaacctttgagcagagagactctggagttcaagtgtgtggcggggttctatagcctgcagttctttgtcaaggccaagagtcttgactgctaccatgttagcatctgcatgtctttgggaacaaaagcaagtgttgggtgaatggctgttttcccttatttaaaccatgtatcctacacttggagatattctcgtgaacccccattgctgactccagggttgttaccacaggagtatgataggtaggaataacccttcctaacaaaggatacttatgaaatcatcaggtgtactgtatttgtaatcaacataatgcagtataaatgattatgctcatttaatgttataggtgattactgtgaggtttatatgtttataatatgcacgtgtttttatgcatatgtgtttataatatgtacatattatgcttatatatttatgcatataataacatttatgctatagcttcttttggttttaccatccttgctgtatagttaatatgattactcaggttttctcttgtcttttgagctaccaggaaaccttttgtttgggaaggatgacatcatttgagcttcatgtggacatgaatgtgcttatattttaattctgtcatggctcttgtctacattagtcactgaccatcaaagagagtctaagtgacatcactttactggaaacacacatattattatgttatggagaattcgagttataaaattaaacattctcaggggagaattttatagacttgaatacattaagactgtggtttgagaaacacagttgcagaagtcggtggactcttcccctctaatgctttagagattttaggagtgtgctgctgtggggcagaacttttgtctttaaagcatactcactctagtagtggaaggagtattagatccttgtcttagggtttcattgctgtgaagggacaacttgaccaaggcaactcttataaaggagaacatttaatgaggtctagcttccagtttcacaggttcaatccattgcagtcatggcagcaagcaggcagacttggtgctggaagagctgagagctctgtatcttgatccgaaggcagccaggaggagggtctcttccgtactgggtggagcctgagcataggaatcctcaaacccaacctatacaatgatacactttctctaacaaggccacaccttctaatagcaccactccctagggtgaagcattcaaacatgaacctgtggggctgtacctattctaattgccacagttctgaaactgtttccagatggtagtggaaataataatggaagagtttagatgttgctttctaaagtcagcagtaactgtggttgtgccgtccattcactgccccttctatttaccatccaagtgaagccgtaatgtcacactgcgaagtctcgatcagagtgagctaataggacatgctcttgaagagtaattattacatggctcacagtagccccctcccattcatttttttctttttacagataatactgaaagtaggaatagcttttatttcacctgtagttgctgtaatccagattattctaagacacgactgtagccatttttcctgtggttgtcctctgtgttctttgtcatgtgcttgttgggaatatgcatggctctaatagactgttcatcaaggtttcttttgaaatagtaatatccatttttatgtttaagcctttagaaaagtgaatgaaaatatgtgtacttcttattttaccatttagaggcattcagatcattaacaagaagaaactgtttttcttaagtgaagaaaatactgtcagattaacctttttattaattgaaaagggaataaattttttcccctcaatttaatctgacccaatttcatatggtccagaatttatcttttcttttacctttaactgtcccatcatataaggtgggcttcatctttaagatcataccttatcattgacactaataaatactaaaaaatttaaactaataggggagttcattaaaatattaagattttattaattgcaaaattttcatcttgtgcttctgacttgtgacacaggtttatatgccttcttatgaatgttcagagcttatgtttttggagagttatgaagttgctcattgagatagaaatcacagatccttaacactggagtcagagtttgcactgtgtatcgttatcgtgtgacttctctgaaaatcaggtcttttgggttcagtctgaccattcctatgagtcactgacagcaaataccctgaactccgaggtgaggaggtctcaccaaggtgtggggctttctgtttgcctacaccgtgatctctcaacctatttactttctatccatggactcactatgtactcactgtgtagtaagcctttatttcattagctagtgaaatcctagaacacttcactttcatcctagaacacttcaccttttctgatgtggcaaactttgtttttattgttaactaaagtcagaagctagaaacacatacaggttaatgaataggtgattggcagggcagcattggtgtctgaagggtgatccagcatgtggtgctgggatgcatcaggtagcccaggaatatactcactgtgaggaaggggttaacttagctggcttgtgtcactcagatttccagaaaaagcttcccttagggcctgactcttgcctgggtcctgggagatgacctctgagccctaggaatattctacctactaagtatttttgtgtgcacgaggattgagggcacaggtatcagtttgatgacagtttatgcatacagtgtggttgtggtgagcgttgattttgctctggggactggagtctaattagctgaggtcatttaagtaggtgcggtatacctcctgattgacctctaataacaatctggaccctaacaattgagccaagtttcctgattaaaaccactttgcacatgttgtcctgaatcacggtggagacccttaagcacgcccttgcagctccactgggagaggacagtgggggcttctagtggtttctctgcactttgtcacacttttctttgctgattttccacctgtctctgtcccttaaaagtcataactgagggaagggatgggaaagatggggagagagaagaaagcatagctgtaacatcttttctgagcttatgcttttaaaactgttttttattattgtgtattgatagtttataatttcttgtattgatgggatccaaagtgatgttgtggtagttttaatggtaactgcttaagcctggcaagatttagccaatagtgttcccatgggctcagttcattagttttgatgattgtgctgtcatgtactgagtaagatagtaggaggagctgggagaagagaactctgcattctcttgcaactttatggtgaatctaaaattactgcaaaataaacagtttttaaaacggaggtaaagtgggtgattgcctttgccatagtcggtcgacagactcatgaagacgttgtactggttgtgtctggagaaggggacgtgcatttgagatactggctcgactccctttggccatctgcttctatagatcttatctactacctcattatttttaacactctttttcatctttcaacgaattctcctggttccatcttcgtaataatctcagcgtctggttacttccaccatctcagtcctgtctccctgggctatgggagcgcagcgctggctttggatttagatgttggcttgacagatagtccactcttgctaaaatttatcctggctctgaccttagttatcctgtccaaaaaatgggtataatctgactttcctggctgtagggagtaagtggggctgtctgtagtgttctttacacaatgtgtggtaaagcactctgtgaaaggcagcctttagttgttaattttagcagttacctcattcccaatgttttgtatattttctaccttaatatttttgcagtattagaaccacaagaacagatcatgctgtcctcttcattgtcccttcctcagtgttgttgatagatactaatgctgcctgaagcctcttttgccccataactcctatttttttgtatctgagactttcttcctctttccccttttatttaattcaatataaacttaaaatttttcccaactatactttaaataaataaaggcttttaaatgctttagcctcccttctagcctaccacccaccagaggtagtggaaaagaaaggttattgggatacggggaaagtggacttgtttagaaatggttctttggaatcccttctgcattgccagcagttcagttcacaggattctccagagatagctcgatccactcgaaaatacttcatgaatacaccagcagtccagttcagtactgttgggatagcagacacgaatcagcagcggcctcagccgagttggcatgagtcagcaggagtgaccaagaccacgagggataccagaagtcctctgctttgcctctctcaacagagtaaaaaggtcagtgaagacttgagacaaaaagcattgcaaagctactgcctttctcagtctgttgagtactatttatattcccttcagatatcacgtgtcctccatgggtctcgcctcaccacatgtcttgcctcagcacatgaatctgtcttagcaaaactctatatgagtttatatcagctgacatcaccctgccaatcagcccaagactgtggaaacagcgagaagctgacagaacaccaccagaaccagaagttttttggtacatttctctctatggagtcccgacaaatggagctcaataatgacgcaatgtaaggcgaaccaatacatgcgtgttgttcatgaagaatccttcatcacacatctgtcctttcacgtgcttactttagcaaaacatcctttcttctgtgtctacctcaggaaaatgtttctccacatgtttgcccaagcaaaacatcatctgacacaactgacttgccaaagaacccttaagcttccacttcagttctgctcacagtaatgtccaaagctctatgctaggcacatgaggtcatacagatgaataaaacaccgtgtctgtccttgaggcttctgtaaataagtcaactgtagagacgaatcacgctctgtggtatagtacaggacagaatgagtatcttgtctactgttctttttctgtctaactgatgagtaactatcatggcacctccatttctgtcattggtgctacagactacacagagaagaataatgggagcgcctaaactttcagtttctagttaaaccccgatctttactgtctctcagaaagagtgctttttttgggagtttgggagttgttaagctgatgaacacagtgtaatttaaagttgttttgctgagaagaggttataagtgaaagcaaattgcagccctggtggtcagtgttcccctacacttattaccgagtcccctgtgtgctgtctgctttccagttgaagatctcaagcttgtggctgaatggcaacctttagttttccactggggacagggatacagtgaaatgaggccatctacccaaggtggtgagtaatgttacttgccgctcgtagcatggtttttattcagtatctctggtttgcttctgactttcctgtatagataatggtatgatatatatcggtgcagcgtgactttctcccagtgtatctctgaccacatcttttgctcagaagcacggtgtggtatcgtataattaaagtaccagattataagctttataagaacagagaacttacatgttgtgtcgccaggtgcatcctttgtagcaaggtcagaatatgtgttgattgattacattcctgctaaggtactcattcttccttctggcttttgcatagtcctcctgttttgccttttcctatgtatgtggactgctggtctacctctgctttctaactggtcccactttccattgtgctactaacaccatgaacttctatttgaaacttatgtgattcctttgcctttcaggatcatttaacttttgtatgtctgtgtctaggccccccagttatatcataacctcccccccaaacaagagcatgtactctccatatctatctttcttgaaaaatgtctcatcttaagtaggtatccaacacattcttgtaggctattttatactttctagtcatacaatttgtgaagtgtatatttaattaaatgcttattaagtccctatgctatttgaaggtcactctggcactgcttctaaagtgtgcaaaaccacctggaaaccaggacttgctgtctctatacttcttgtttacaattgaaccttgaggtttgctgaaggttggaaagcttggtgcctctaattcctggagccgctcaaagtcctgtgagagatcatcagctcctattttatataaaaagtgcagaattcagcatcagtgctctatacagagtgctaccatacgcctcacgtagaaatctgactcctaaaacgtgggcaacaagataatgtcaaatgggactatatcaaactaaaagacttctgcacagcaaatagatagtcatcaatgagagtaaaaaacaagctgtagaatggggaaacattcataaatcatggatgcgacaaagggttaatatccacaatctataaagaaatcctacatctcagtagcacaacctggacaacaacaaaaagcaaactgagtaaaaactgggctaaaatgagctgaatagatattcctcaacatacagacatagcccaatgtggtggtacatgcctgtaatcctagcacttgggaggctaaggcaggaaagatttcaagtttaaggcctgtctcagcaatatcaggatctcaaatctatactcctgtgttcactgcagcatcatcacccaaaaccaagtcatgggtgcagtctaaatgttcagtcacacattaatggataaagaaaattcagtatatacatgcagtggatattcaaccttcaaaagaaatcttacattttgtgtaacatgaatgaatgtggataatgctatactaaattaagtaagccaagtgtagaacacatactatgtgatgccctttacatatggaatataaaatagtcaaactcctagaaacagaaacgtgattgctagggtcctgagggatgggaaaacagggagatatttgtcaaagtgaaaacttccagatactagaaatgactcagtcttggagctgtgtacataacacagtgtctgaattagcaacatggttttagatactttaaaagttgctatggggtcaatcttatgttcttatcacatacacagctaatgtgtgtgtgtatgaatctagaagctatcaagtgtattgagtgcaatagttgtagaaatagtttcatgagaatacataacagttgtgctttaaagaatttcttccagtcttagacactttaaagtggagcatattaaaagttacatttaatatgctgcttttatatgggtcctagggattcaaagtcagggcaccatgttgctcagcaagagctcttacctgctgaaccatctcatatatctatctgtctatcatctatctatatttctatctatctatctatctatctatctatctatctatctatctatcatcaatccatctatgttttgtgctgggggttgaacccatattgtacatgctaagctagtatctcaccactgagctacatctctagttcatgctctacgcttttctttgatagtgaaagagataatcttaacaatttcatatttctgtattctcattttgattctctgaatgttgattcactgtctattgggagatgctatattggatttcagtgtccttaaaactgaaaaggcagatgtgtatactaacttaaatcctgtgataaatatattgtctgaaaataatgtctaagcactttgactttaagcctttcttagagaacttctgaaatccagatggcctcctaacatcctcttttgaggtgtcatgaaaacccaggatatgctgtgagtgtccagaagactcttcacttctatggtgttgtcacaggtagctaacaaagtggcctactgatgaatttaacttaaagctcctaggggcttaagacagaaggtaattcttcctagaaatcatgccccaaagactttttcctgtacatataagccttatttatgaggaagggatagttataacctgaactggataagtgatgttcatagtataaggataaaagaatggtatcattgattagggtgggctgattatggactgagttatcttcccagcctaaaacatactgttttaaaggccttattgtatagtgtgaagttctttttgtgcttctagtttgttactctgtgtgatccttagcttagcctactggaacttcctgtaacacgggactgggctgctttgtggttttggaagtagcagttctttgttcagcagcgttcttctcactttctgcttccaggctctgggaaccacattttgaaggttaagcatttcatatcaacatcttgatacagtagaagtgatcaagaattgcagggatcaaaagataagtttttctgtagctgatgtgttatacctggctgcatgaccctgctttagtcagctctcttttctggtacttggtgtcctgtactgtaggaagggactaaatttctctatcacaatgcttaatgctattattaataatatcagtagagacatcataatttaatatataatttaatatatttaatttttcagtttaggaattatattcatatataattttataagaagatatgtttacatattattgttttaaatgagtaaaaatattatgtgcatgtgagtgttccgccataggtttatgtgcatcatgggtctgcaggctgctgtggaggccagaagagggtgttgagactgaaagttagaggtggttgtgagctacctgatgtggatgctgggaaccaagcctggtcctttgtaaaagcagtccattcttttaaccactgagccatctctctagattctaagttttagattctgaaacaccatagcattaattggtagttttattactgtttaaatttgaattagtggttatgttatggtttggatatgattgtaccactaggcttcatgaggtggcagcttggtccccgtttagtgtcgttacaatggtaggaatttgtaagaggtaggtctaagggagatcctgagatcggtgggagtgtgtcctttgaagtgatcatctgaagagtgagttgtaagagtaagacgagcctctgccttgttctctgacatcttggccggccgtgtgatctctgcctctcacatacacctgcactgtggtaacatctgctgtaaagcttcaccaaggctcagcgctgagcagctgctgatatgatgcccttgcatgtctagttctgtgagccaacaacatcttctttcttctcttcctttctttgcttctttctgtggaggtcagaagagggtgctagaccatctttaggtcacagggaatatgagctgccccagtcccgggacctgaactcgggtctcctggaagaacaagtgctctcacctctgagccttctcccccactctttttcattctgtttttgaggcaggtttcactgtgtagccctggctggcctagaactcactatgtaggctaagctgtcttcaggtttgtggcagtcttcctgcccctggatcctgatgtctggaattagagtcatgagccatcattcttggaactatttattttctttaaaaagataccttgcctcagattttttttttttaagatggcaatagactagtatgggctggttttagctttagttacttgaatgatggattagactttcctaaacttagagaatgtacttaatgaattttattcagttttgaagtgttttatgactagtattaatatttctaaaaaacaacttgtaagtaatagttatgaatgatttctagtgtcatatttgaaggctgtaataggctttctttctgtgaagactgagtaaggttgccatctagtaataactcagtgtggttatttaaaaataaatatttaacatttatgtttatagagtactctgcgatttttaattagcccgaaccggtgtttatctctgcaaatgtctggcaagtgccttgtgcagcatctgttctgtgctccttgttaacggactcgtgacttgttcttctttgtcctttgtcttttgtgcactttccagcttgtgtcagggaagcttatcccatgttcacgttgagctgatttgtccaaagatcaccttgctgctcttaccgaccaacagttcactcaggagctgatgatctaattccagggtgcgagaaattttttaaagcttctggtaatttttctcgttcttgactgaaatctgatgaacactactttctttcctagaacatgtctaagggtatgtgaccactaaatccttgctgaccttagtgaaaagtcttatttctggttttgcatatacatttttaaaagaaaatttaaaagaattatctatctatctatctatctatctatctatctatcatctatctgtgtgtgtgtgtgtgtgtgtgtgtatgctggtgcctctaggggcctgtaggggacattgtattgggatttcaggcatttgtgaactgcctgatgtgggtgctggaatctgaactccggccctctcataacggagtaagtgctcttaacctctgagccatgtgtccagcccctatatttacattgatctgtgtattttcttgtggttcagttcttgggattgacattgtggtctatagactggcagaagcatcccctttgcctgttggaatttcaggccctccctttgtcctactaaatcagagtctttggatgcataaaagcttcagaggtggtgttcaagtcccctcagctcgggctttatttacttgcggctggaaacatcctgttctagtttcatttctgttgctgtgataaaatattgtgaccaaaagatacacaggggagcagagtgcttgcttggcttatattctgggttataagcaccactggagggaagccaaggcgaggaactcaaactgctagtcacagcacatcagggagagtgcacacatccttactgctgccggcctgcctgtgctcagctagctttctctctgtaatacagttcaagcccagcctgggaaatggtgctgcccacatcaggctgggtcctcttgtatcggtgaacaatccaggcgtccaccccagacatgtcgctagccaacctgatttacacagttcctcagttgaggctcttagatgactctaggttgtggaaagttgatggttaaaaacgagctggccccagtggcacaagcctttaatttctgctttggaggcagagatgagcagatctctgtgagttcaaggctgtccggtggtctacatagcaagttccaggatagctagggctacatagagagactctatctccaaaaagaaaagaaagaaaaaacacctagccatcacaatcctctaacaatctagaccgccttcctctgagggggtgctgcccttcccatgcatgccgtaaagaagcagggaggcactatttcttctgccatagaaacatcatttattgaatcattatataaacatacttttattgtactctgaattaccgttggctttaaatttgttaatcgttattttcggttgaaacataaaactagagtctttacaactgtggtcaaaaggactttaatgttgtttttggcaggtcaggctatgagcatagccccactggttacaagacagcttagagagtcacattttacctccctaaggattgctcctatccgtgtctcccagctctgctcctccttcaggtagacagggttctgaactgcacttctcttgtagaatcatgactctctagggaccaactctggtgactagaaaagctgctgacttgggcatctctgttacagactttcagccccctgctgtgtctttgtccactaacagcaggggcaaattaagtctacctgcagtctaggaatggtagctagcttttcttcttttctttactacgtaaatgccatagttcaaaagcaaactgtgtttaaaagttttcttgcttgtgtatccacttggagatcttgacagtgctaggtaggctgatgcaagtatcgagttcacagagtagactgttaggttgtaattaatagatggcaaaccgtgtctgtgttgttttgcagtgagaattcactcaagtgtaagctttaaaggcaatacttgtaaagaacgggagactctgccgattgatttttattcttgtaatttgctagttttcctgtgtgctagacttttccatggaggctgtgaaaatgaagctctcctgcccacgttagacgagataaaattgagactgggaagatgaagtaacacagaacaccctactcaggaacctggaactatgtgtccccagctggctcagctcccccagggtctgcgaggcaggtgggcattcttacgtttctgagggcacctttgttgttgtgtgagttgtgtattatataatactgctttaatatggaaacaaatagctagcaagcaatctggttgtttagactttgatgtctagagacatttctccccctgcctcttaagaaacaagtgaaaaactgtcattgctactaataacatttaaatattgaaacaaaagtgatcatttggaaaactcacactgaaaaacatttctgatgagactggtaataattgacctgtgaacattaggaagctctgcatggctaatctttcacatgattggtgtgtgaactgtaaaacatattggtaaagatctttttttttggaatacaaagtagaatagaagattttaaaatagtagaacaaaagaaattcatttctctgccgagtttgtatggtaacttctttttaaaatttagcgcttcttatgggttggtatattttcaagtgaacatttctccagttatatgaaaaaaaccactaaaacacattttccaattgtagacagtcatattatcttcagagacattagccaaagcaagaccacgtgacaggctgcagacataaacatggaagcatagttagttgttgtctgctatggtttgcagacatttctattaaaaatgtattttgtggcctgaagaaatggctcagtagttaagagtgtgggctgctcttctagcgaaactgagtttagttcctagcacctacatcacgtggcatataatcacctgtaactccggctgcagggatctgataccgtctgtcctccaaggcacctgcatgtccatgtttgtacacagacacagataaacacacatacacaacaataaaattcaagaaacaactttgcattagatgtatcattgtctagtgaggttttaagtagaatcataaaataaataatgaattataatataaataaaaaagaccccaggctgggcctagcacacaagcctatagttctctggggaggtggagacaggaggatctgaaattcaaggatgtttgaagctgtaaaggaagtgtgggaccaggctgggatatataagactatgtctttaaaaaagtatgtagatacttaatggaaatttgttttatttcaaatgtggtaaataccagtgtgtagttcatatgtctgaaagttccttgtgaaccttagcaattttgagaagtagaaagcggtctttgtggatgaagacagttttcactgcttatcagcgaaagctccaacttttcagttgcttttaagaccatcaataaagtggtcctaacatactttttccaagttgtcttttttagagatttttaaaaaaattttatgtgtgtgggtattttgtaggcatgtatgtatatttacacttcatgagtgtgcatagtacctaaggaggggtcagatcctcaggaaatggacagttgtgggccaccatttagattcagggaagagcagccagtgctcttaactactgagccatctctctagtcagcaaattgtgtcttatattgatccaaacacaccctttataatattcatttaagtactcatttagtaatgcctttgtttgttcacttagtcatccaacagatggaaatccttatcctctgtgtatttgtagtctaatgctgtgttgtctaaaatagtcctcagccacaggtagctctccacctaaaattaaatacattatatatagaactgaaagttcttttctcggtggctacattctaggtgtttttcatatgtggctagtagctattatgttaggcaacatagaaaacatgcccacattgtggaaatcctttttttttatagcgatattctgttatgtgtgtgtttcatatttagagttgtgttccatccctaagacacctcactatgtatatgtagagtcccaaattacaaaaaatgctgaaacttaaaaaaacaatttgatttcaaataagtgaaataactaagttgttgtttaaaatcctatttttagagccagtccttgttccttttaggagacagtgatactgaggacctgttgtctggtctgtgcttgtgctcactgattctaggtcgtcttagtcgacagggaatgcagggaaagtgtgtgtgtgtgtgtgcttacttttgcccatttatgtctgtatctttcctgtttctacttcttcttctctagttatgccctcctgctgacatgtccagctctgatctggtatcccgggctcgttctgtctgtcccctccctatgtctgtagtcccctctctgggactgagagatacactcccattgctcaaagaatatttacttattttgtcagtcttagactatacagaaaatagtttcagaattgctaattcattcctctaggggaagaatctactgcttagagtttgcattttgtttggagctaaaacaaacaattttgacccaagggactatatttcaaagactatggttcaaaagctgcttgggttgcttctcccagagcgaccgtcacatgtttgaaatgcagtgctactagcatcccatgttaggattgccttcccacttttatatatgtatttattttaacataatctaaaagtcagaattgtgcaacaggatacgcatgtccctcttcccttagttccccctgatctacactcctgcctgcccacccccttacttaaagttctgggtcatctcttctatgtttttgctcaaggccaaatccatgcagactttattttctcctattttgtataaagtcagtgtactgtagatgctctttctaaactgctgttgagatatcctgtgatggtgtacctttgtaaagatttattttatttttagttttgtatatgtgtacacatatatatgtgatgtgttctggtgcctgtggagaccagagccactgctacttatggagttgtgagttgtcagatgtgggttctaggcagaaagttgaggacttctttaggggcaacacatactcgtaacccctgagccatctttccagcactggggtggtttttaaacctgatctatttgtacacagtttctctgttagtcctttgagtgctgggtttcccctatgcataaatttttctacttttcctataaaaaattattgtgggtgtgtgcatgtgtgtatgtatgagtatgtgtacatgtgtgtatgcatgtgtgtgtgcttgtgcgtgtgtgcatatatgtgtgtgcatgtgtgtgtgagacgttgaggggtggggaagaggcatgccccaggcacatgtgtattttattgagctgggtttgagccggaagagcactcctattttctgcaagtgtgcatgtatggttggtcctcattgtttacagattcagtgttgtgaatttgcatcctcataatcactaaattaacatccttggaaccttcttgtcatttctagacatgtatttcaccctcccaagtgcctccaatgctgagctgtccagaaggttccaggaccagcctgtttagatgaagattttattatgcaggctcattgattacattatgggtaaactttcaggccttttctcctttcaggaggagtaggtgtgagtcgctttcctgttagttagtgtatagaagtctccatcttgatctatttggggctctcggccatcagtcctctcaacacacaaaggataatttcatcatctagaagagtccaaggctttatcttagaaaaaaggggacaaaccctacatctgtattttagacgctcacacttttataatttctgtttgctatgttggagactagcctgtgtcatgtatctactgtgtcagtggggacttgttaccccttctggacttgacatgccctaccctcatttgggggatgtcacccttctaataacacgtctgagagtgctttgtggggagttagatttccaaatggggtctgtttcccagaagaaaggggctgggcatcagtcaggaacgactgtttactgcagtctctggatccggcttactgggtaggcttgagttgagttagtacacgggtaaactgtggcatttctgagaaaggaaaggtcccggaggatttttggggaaggaattccttgctgcttgttttccatccactttggcaatagctgactgtttcaggacggagtcctctggctttatgggcttcagtcatctttgctggagggaagcgatgtcaaggaaaacaagggccctgcttgcctgcagccatagtctcgcccaccaagcctcccgccagagacacataaaaggccttcctcttgacttatggggcaagtgtgtcattcttacataatacataaaacatgtatcagattgcatacttgtaccacaggagtttggttcttcttgttagtattgtctaaagttacaacatgtaaaaagtctttatcctactttctgagcctgccaatagggaaaaaaaaatatcttaaggaacatttccttttggagcctggagtgtttttcctctctagctcttatttaaagagaatatgtaacttagacatttaaataagactaggggacatggccaaaaccttttcaatagactggctaaagtacatgaatatttctgtgagtgagaacccatacagagcagagtaccctggcttcccccactgacctctggtagggtttgttccctcatgatgagctatgatatctctcgggaatcccttctctcccctcccccttctggctctgtctcctgcttcagaaaggatatagaattattcgtctaagacacaggagttattaggctcctccagtccttttaatttaatttttctccacttgggaacactgaagctgatttcactatgtcctcgaaaggcgtcagtcctcttgtcaggcaaacaactacgtactcggcggtcctcttctgggctttggatgttgggctattcagcaatgactgccttgagcagtctctctagacagtgcactgtgtgttaaggtactttttttctttttctttttctttttaaataaatccttttttttttctcccgagacagggtttctctgtatagccctggctgtctttctgcagctcagcagcagccgtctttgggtgcaaactgctgcttcttgtagatgtcctcatctcagtctgtcgcagtgtcttgcagtgcccattttattactagtgccagccgtgtaaggtgacagtcccaagttccgtcagactttactgagtgctccactgggtttcatacctcatagcaaactctgagggaggtgttcttcctcagctgtaggtgtttattgcagtcttacccgtggaccctagttactgatgctgaggcaggaggacagctgcaatctcacctcttcttggactgtgatcaagttagggcacattcttgcaggtagaggagaggagagcatactttgatttttgtttcataggatttaaagtttctataagtaaaaggtctctatatccttgtagtttttatcagaaggaagtaactgctgggaagaagtcaaatcattacatgttcaagtgcacatatttatcattggtgacgcacaccttggctatagaggttaaagggcatgcacgatgagagtatgtgtgctgccaggagagcaagctcggacaagcaaacaaattcattcccgctgctactttcaggctgctgcaccttagggatagaagtagctaaaaaccactagggggcgcctctgaattagaaaatgagatgccttccatcccgttcactacagtcattgtggcctgcttagtagcaaagcagttgccagtgacaaaagctatggcagttcctagagcctaggaaaagtgtcagagaagagagaaagggagaaatggaggcaaaagaagagaaaagagcaaacagtagtaaaggaggcattggaatgtgatgccttcaggagtatgggaccagtaccatctgttgcttataattgggtctggctctcgtttattcactgacacttaaggaatgagagtcagggttcctgattgagataacgtggaggacatgatgtcgttcccaccctctcagactcaacaggttaagtggtttttaaaaagctgagctgaaaaatgttgatattttccatatagattatgttaaatactatagaaactcttttgttttggcttgtttcatattctccattccattcccttgccagaaaaaaagatatatggtattaaaaagcaatcttgttgacatgcctggaatattggctgttggatggtaatgttggtcaggactttggcgcctatagtcagatacccagttcttgcttagggagtagtgtatgtgtgtgcatctgaggactccatcgtggtgagttactttatagtaatgttcactagtaacttgaattgtttagttaaccatgtgtgtaaggcttctgagtgctcagtgcatttttggttgagtgaataatcaaatctgactagttacaatatacctggcataagatggctttgcataggatcctttctgaaaggcttagttgtgagatttgtcagaaaagcctgcctttaacacgtccacacgtctgatcatgtataaggaactaagtgccttgacgtataagacccagttcatttttaggaatacccagaagacagggttcggtgcccatcctgtaaatacatttcgttttcattttaatatgggttctgttgcttcatcacgcatacgtagtctaggtggtggtgtctgtttctgaaataatgggggctggtgacactgacaagacaggccatggattcagtcaagaccaagtcgagaagcaaagatgacagagtcattttgccgtggctgaactcatctacaccagagatgagtgtgtgtgaatcagggtttgttcatcctcgtcctcacctcaggcaagaaggctgccagaagtgcaaggccaggttgggcctttcagaaaggccaaaggagagaccaggaagagaggcaccttctgaaccgaagcaaagcaaaaatgaaccaaaccacaacccccaaaacacgcattcattgagtgccagggttattatattcaaaaatataaattaggaaataaacaccatttcagacccttaaatgcatactattttccaaagaacaaaaatggaatctttaaagaatctttggaatctttaaagaacagaaagtttaaaagtaggtagagattttttttgttgttgttttgtttgtctgtttgtttctcttacatcccacccaggcagtgttgattctcctgcctttccttcccaaggcctgggatcgcagttctgcaccaccatgcacagttggtgccgtgatggggattgaaatcatgcttagcaaatactaagctctcggcccctaacatagtttattgggatattcttcacatggcatgtgaagtcacctcaccagagtgtgtcatcgcattgtgaaggatagtcacagatggtgcgggtgtcactactccctaagccaaattttccttactgcccaaagcagcccaggccccaacagcaggtaagtctccatttttacctccccacagcctttgcaaacaagttatgtctctatagatttgcctgttctggaaaattcacaaaaatggaaccagacaacatgtcttctgtgattgatttctttcattaaacataatgttaatttaaaatttgtctatgtagtagcatgctctcagtacttgatctttttttgttttgttttgttttgtttttttgaaacagggtttctctgtatagccctggctgtcctggaactcactttgtagaccaggctggcctcgaactcataaatctgcctgcctttgcctcccaagtgctgggattaaaggcatgcgccaccatgcctggctgatcatttttttattacaaaatgatatgccgttgtacgaacagacttcatgttatttctctactcaccaattgattgacatttgtttttggggtattatatacatccatgttcaagcttttgcacacagacatgcttttatttctcttgattatctatccaggagtagaatttctgtattcaacatttgaggatgtgtgaagtcatcttccaaagtggctttaaccattgcaatcctgccaatactaaagcagtgtctcatctctgcacatcttcattagcacttactgttgcctaaaagattaccaccataacttattagtgggtatgaggtagtcatctcattgtagtttttatttgcatttcctagtgcctgctctgtttacattggcagtcattttatgtgctcactggccatttgtatatcttttatttttgagaatatgtttaaatttttgtttatttatagttggttgtctacattattaagaacacattataaattagatacaagcctcttatgaaataatcatctttcccatctttctgcttttgacagagtatttttacatttattcattttgaatgtgtgcatgcgtgtttgtctgtgtgtgagcatgcacatgtgtgcatgtacctacacatgacattgtgcacagtggaggtcaaaggaccactttttgtagtggattgtctccctctaatatgggtaggtgggactgaactcagatcaccaatctcagtagcaagcccctttacctgttgagccatctcactagaactactttgttttaaaaattttttcttttgagtatttcatacatttacaatgtaatttgattataggccccccattgcccccctatctcacacaccctcacagaacctgtttgctgacacaaggtgcattagaaatataatgattgaccttgtattagtaggttgttagagacaggataacagtcgtctctactgagtttgggatgtaacacaattataaggagcctacatgaacagaaactactaagtgaaacttagtaacctctagcacatagcaccattatcctgaatgctagggattggggcagttagaaaagaatggctggccgggcggtaatggtgcacgcctttaatcccagcacttgggaggcagaggcaggtggatttctgagttcgaggccagcgtggtctacagagtgagttccaggacagcctgggctacacagagaaaccctgtcttgaaacaagcaagcaagcaagcaagcaaacaaacaaacaaacaaacaaaaagaatggctgttttctccttttgtggcacaggcaagagatactgttagaaatgttgctaagaagtgaaaccattcagaaggacaaagtggttctagcaggaaccactgttgcgtcaacctcagagactcccttacaggagttgaggatcatagctgctgctgctgttcctttcctataggagcagatgagtatcaggactgtcatttaggttcatattttaacaggctgggataggtgggaaaaagtggagtgtgtctctggcgtggtgtgagcggagatgtttcttcattgagagctggattgctgtgatgcgtgtggaactgcacacagagatggtggcgtgcccacccattggctattctcttgtagtatgtcaggctgctgttcttagtccccttgccacacctttagcctgatgttcaaacactggcaatcaggatgtgtttaatgttgatcgaggtaaataaagattgaacatggtgggctagttagaggcacaacgagtgcgctctctctctctctctctctctctctctctctctctttctccttagcagttgaatgttaacagaccgttgaagaagttgttctttttcctcaagagcttcccgtcagctagcccagcagcatggtcagtgtggacttgtgactctggcttttcagttgtgttacaggaaaaggtactagccatctgtgtgctgcagttctttaaaatacatattttcaatccttcagctggtggtggaaaacatctcagcagctcctggggctgaggcaggaggattgtggatataagacaggcccggggtatataacaagagcctgtctcaaaatcaaataagataagagagggatggaggaagggagggaaaaagaggaagacagacagatatccctttgattggagtcttgtgacctgcttaaactcttctggcactttctctttgacgcctgtccacacccaggaagatatcttagattgccctctagttatcttagtcatgtgctttgagcagtgaaggcatgagtcagagaaggcttatgctaatgattttttgggagggggttcctgcaatcttatttagagttcgaaatggcactaactgacatttttgctcctttgagaaatttgtaactgagtgttgcataaggctgacataattgagggtgtaggcttcctttagaacacagcccccaggagactgttcagtacagaatgtaaagatgctaagatgatagtggaactcttggctgccaagtcataggactgtctcttccagtttaccagtttatgtatagtctgctgtgtagatgatgctggtcttcagaacccctcccccctctggtttttttttttttttggctgttatgtcctgttggcacttgtggttaagaataaatagctcagaccctgttaaactgcacttgcttgtccagactaaaggtcagctgtgtgtgactaaggaaattgtctgcattttatctagtgttatgaggtggtgagaaggctattgtattgattgcaggctagggagataatttgtaaacacggcttggggataggaagaggtgtcttagataagaaaagcagtgatcaaaggatctgtatttgctgttgatcagctctaactgtgaagcatctggggcgttgggctgtaaattgagagattagctgagaatcattgacttaatactcagccggttgctgtgagctgagagcaagtcagccatgttccttgtctttagggacttagacttgctgagacaacagaggcaattacttaaaacccatgttgaagtgaaggctttctcttttagaatcctctttccagtgtgaagcagagacaacagggagcatgggagaaacgacagcaagcctattttaggtacatgtctgtaccctgcatgtgatacgggtcacattgccctgggaaataagctttagaaatggtaaaatagttgtgtgtctgtagtacagatgccgtgtaaaatcccttatcagacacaagactgacaatataagaggaatactaaattccttaaaagaaatctcagtagctgtggataaaaccaaaaaatttttttaaatggcaaaagtgaaattttttaataaaaaggcataaattcagaatactgatgacaaccgggcagctgcctggtgggaagatggcttctactgcccccgttgtgtctcgtcttctggggctactggagtgcagcagctgtgtagaaagcagcaacattcacgtcagcatgttctagtcactgaatgtgtgagaccagcgtctgacagtgttgtttgcttggtgaaggtcacttcttggtgattgtgctttggtgtgtctgtctccagcatggttatttacaccttcaagacctaatctagccaggcactgtcaaagcttcatagacagataccatcactctgtagattagggtttcaacagagaattttgggagagatgtaaaattttagtccacagcaaattatcagattagagatattccacccaccccccatcttcctttcttattgctgggaattatctctagggtcctggcatgccactgagttacattaatagctttctagacagaaaaagtgctaattaaaagagtagttggcaggttcataggcacgcatttcatagccatgccttgtaacctacacagtgtgtgtgtgtgtgtgtgtgtgtgtgtgtgtgtattcttttgcatttatcaaatgttttatttttattttttaaagtcatggtgttttgctggttaaatatattccaacttgaatcgttttagaacttttgcttatgttaagttgcaggagaaagcactggagatgctggcttagccaaactatcatctcttacattcccactttattcagccattcacttttttactgtaactttcttgaagccaagttacagtcaaatgaaggaaacatgttaataaaaccgtaagtgtgaggagtggaaagagatagattaagaaagagagagttgtcatctgggaaacacaacaccagtgaggtagagacctttcccacggtctgtgtcccgtgtctgccccaggtttccattactccactcagacccattgtccaggtcaaaagcgttctagctggtctggcccccgacatttaagtattcattacctcagtcagtgcatgcatatctgtatttaatgatgtttgtgcttgcttacttagggcttttaaactctttgccgttttagaattcagggtcatcagtgtgtgtatgtgggataaacccccaaccaaacagaaaactatgatttcccctttcatctgtgtcccatgttataccaatgttccctgaaaatagcaacagttttctgggaaaggtcccgactgaggctgttctcaccctttaccccggctctccaattcatgtttccatcttccagtgtggtcatgtgcttgcccaagcctggcttgtgaaccgtggaggatattcgtggggttttgttttttaagccatacactgtgcacatgatgcagtatttaatttggaacgagctccaagttgagtcacacgtgcttcttgtggtgtttatcttggagtccacatgtaggaggaaagtatttttgcattttatacatctggacactgttcatggtctttctgtgacttgggaattgtgtgtggggcaaaatccaaggaatagtattaaaataacacggagttataatgaggtccgagtgcagcccctcaggagtacccttctgatccccgcagagtttgactttggacgtggtgaactttttcagctgtgtggttcactggtggcctgagtagattggtggactataaattacccgacaccctcccatgcagtccgtgtgctgctagacatgaagtctaaacgtctttggcaaatttggttctttaaggggagtgttttgacttgattttgtatggggcaagataggcaaactgagttctgctcacggctgccctgcctgctaatccactgcaccttatgagactttttagggtctctcattgatcttctgctcctccctcagttcatgcatccagaactacagtgaccccgagaccatctcaggctgtgtgtgagggttgagggcgatggaggtgatggtggtgtccgtcgtgtctgctgactttatcctttttatgatctcacacaggaggttgtcatttaaaacagggtaaatgtgatgtggttgctccagtgccaggttttgggtaggggtctgctagaatagggcaggtgagaagagcgtatagaatgttgctgctctgagtgagattgcatacggacagtggatagggttgcttctttgtccctcagcctggtttcctttagtatctgcatgaattctgtaatgcagatgcaagctgggaaggcagagtaaagcttcaaatggactggcccttgaatgaaagagggcaatgtgttgtccatcatttgggtggaaagctgtttggatctttactttctatataagggctgtttgcttttcccttctttcaatgtattaaagagaagaaaaatctaataaagtaattggacctactggttataattcatacagaattttcaagtgtgtttaatagtggtctctcatacaactttaaagaaatgaataattggagaggaagggtcacagttgtgttgtagtttgggacccagcagagtccgaggaggtttgagtgattgggtgaactgctcatctgggagctgtttcttttggctgccttttgtgcctctccttggggacagccctcctttactcttataatgtattttgcaactttcagtgagaaaatagccatcaaaaatgaaccgttagtaaataaacacattctggttctatgatgggaatcactaagtagtggctggcttagtttgaagagaaaagttcatggtagtaactccgagaggtgacaccaggatcatgcttgtttggcgtgttaatgagtccaagaggaaatggtgaaatctgctgatgacaccaaattgttttgcttgatcttaacatggggtttctgggaagctgctttgtagtattagaaatagtggaaggattgggcaatttggggcagacatgctgaacttgaagtgacggtttatgtgaagtagtcagagtacaccagtaaagttacagagccttgtcctcttgaggaaactgctctctccagaatgtgaagactgggacaaagaacattctgtttagaagcaacagtgatgcaaaaatatggcacctgagtatccttttgaaggtcagccgtaatatatatgagtgggtgttatttcccttcaaaacaaccatgggatattatatactcactttatgtatgtttgcttttttttgatgggcaggtctagcccttcatatagccttttaagtattttctgtggtttgtggattatttttgattttcgaatagtctgtcatttagaatctgagtaatagacttaaaatgtaaatgagatgtgaagtagtacagggaatcgtttgcctccagggctgattctcaaggaaactaccatgagatatcgaaaggatgtttgtgtaatagtagtagaataagttcttcactgatacagctcacaaatgtgactcatctatctatgtacattacagaggcatgttaacatatccatcccgttataggctacttattcatgggattgaaaccattgcattatacatgtcaagagcacattaccaatgagccccagccccaggtccacacaccacacctcttccacaatctccttttccatcttcaagcattattagaaaaagccggatgttgtacactacttagagagtcccttagtacactggtgcctagaaactacaaagattctgggagttgaaaacgtaagagagacactgtcacaggcactgagggctggcaggctgtaggtatccttgcattaggaaaggatttgtgtggtcgtaaacaactcacacgaaacacacaaacaggagtcaagggggctggagaggggaggagagtcatggaacctttgttttaactaagcaaggagaagatggggctggcttcttgggctccctcacctccgagagttggaatccctggagtgattttggaaaaccactgtagagagtcaggtgtttagagggccagaaaaggacttgtatacagaacaggaagacttcattccttccgtactcttctgagattattacaaaacaatttaaagttttgcatttaccaattgtatactttctttcaaaagtcataataagagtccttcaaatgttttaattttgtgacacctttgtattttcacagttctctaagtttaaacacttcaaattgaaaaatcaggagaagctttacccaaaagtagaggaattcttttgtgagtaatattctgactgaatagcccaagccaccgcccaccccacacaccccaatctccatggatctaaatgcaaggcctcagactggttccgccaggttcattggaggccacttgttaaaaacaaagatttcatattgtagggctggtgatgtagctcagtgatagagctcttgcctagcgtgcactaggtcaatgtttgatctcagtattgcaaaacccgaaagaaacaaagagacaaaacgacttcttgattctgacacactgaattagaaccttcagggtagggcctaggtattttagtacattctcagcacaagagaatagtttctaaaagtagatgtagactatactccgactcctgacaaggacactggaaaggtggaatggtgctagaatgtgggaaatgaataaatagcatcgtgtagagcttgttctctgaagttctggagaccagagtgtgattagtgggaatccactgacagtaacacaaatattgtgtgtaaaaatttactctgagtgtctggtcattcactagctctgtgacttgaacaaaatatttaataattcctcagtagcttattttctttttctctaatatagagattttttggatttgattcctcagcactgcaaaggcaaatcaataacaatagcagcagcagcagcagcaacaacaaagatcattattgctgttcctttagcatacaaaggagctatctggtctctactgtgaatttttttttttaatggtcagttctatttagtaaggagggggaaagaaaagcctaagaatattatataaatgtatatgctgggggaagaagggcttctttcatttctttggaaggagattttcttttctttcttggatattttctttacttacatttcaaatgttatcccctttcccggttcccctcccnnnnnnnnnnnnnnnnnnnnnnnnnnnnnnnnnnnnnnnnnnnnnnnnnnnnnnnnnnnnnnnnnnnnnnnnnnnnnnnnnnnnnnnnnnnnnnnnaccaccccacccactcccacctccccaccttcagtttctctacactggggcatctatcgagccttcataggaccaaggacctctcctcctattgatgcatgacaaggccatcctctgcaacgtgtgcagctggagccatgtgtactccttggttgatggcttagtccctgggagctctggggaaactggttggttgatattgttgttctggaagaagattttcaagtgacagtctcagttttcatttctgcagtgctcgctggtcaaaagagctgtgatagagcagacacagtagatggcgctgtaggcttatttttaaaagaagctagtgtaggggtaggggtggaaggagagattaacgtgcattgtgataagccccgcccctaggactttgtatccatgtaagtgcctttaagaagtaaattttggggggtagagctagagtataacttcagtaaaaatcaatgtcttagctgctctatttgtgtgagttttgtcacttggaaattattacttgtgcttcaagctataaaatgtaaaggagttattttcttttaagacattttcttatgtatgagggttcccccctaattgtctttgtattttaatatttccatttcttcctagttttttctggcccttttttgttatctaataaaaatatggttatgaagttaaattgaatgacatcaattataatgtagtcacatttttaaattcaagttttcacattaaatacacattcaagtagcatgggtcacattaaggataatttagttttaaattttattttattttattatgtgaatgggtgtttttcctgcttgtatgtgtatgcattgtgtgtatgtttggtacctgtggaggccagaggagggtgccagatccctggaactagagttacagtgcgggtctgggaatcaaatcctagatcccctagaagagcaaccagtgctctcagtgactgagtcatctttccagctcatatgtgtgtgtgtacatatgtgtgtatatgtatgtacgtgtgtgtttgtgatcttctatgttttatgtggtagaacttgtttaatctttgtaataactatgagaactgttatccccctttctcgataaattgtctcagatgcttagtagattgctaagttctcatactgagtctgaactgcagctactgtaggaatttcatctgtggattgaagttacagattttgagcacatactgtgtgccaggcatgctgtatgccaggcaaacaacagcggtcaaaactaacatgggtgttaccattaaagaccttaaaattattaaatgttcaacagagttttttggatgcccgatgccttgatgtcggtaaaaagaaaaccccagggaaatggtcagtaaagtgcttgctgtgtagtcctaaggatcctaatgatacctgcagcactcacaggacaaggtgggtgtagtaacctgcgatcataatctcagctcgggggagactgagacagggaagttcatgggcattgctggccagctagcctagccacatttattaggtctgggccaaatgagagacctttgtcttaaaaaccaaagtggatcacccgagggatgtctgagattgacctatggcctctacatacatgcatgtataatcacaagagagggagatagatagacagagaagatgtgcttcagtcactatctcctgggtaggccaaggaactgaaagttcttcaaagagaaagatagaatcatatttaccttagacacattaatatattaatatttttggatatatgtcttttatccaaggggaaaacaagactttcatgctttgctccttcaacagttgaattatgactttctccctgaccgttgaagtatgaaatcagggagggagatggttctggggaagtcgctcaacatgcaagcatgaagagctgggttcttatcctctaatctcatgtagaaactggacgtggtggtgtgctctggtaacctcagtgctgggagatgaagacagggggatcctgggagctcgctggccagccatttcagccaaaacagtgagctttaggtttgctgagacctacctcaaaagtgaggcagtatgactgaggcaagggaccggagagtcaacctctagcttcccataggcatctgggtggctctcacccatgtacactcatgtacacacatgcatatactacatatacacacgaaataaaaatgtaaaaattagtaaataacaatgagaagaaaataagataaaactggcttctaggtaagagttaggaggagtaagtggaatcaagctacaccagaatatctagactttgtgctgattaaatgacaatattcaaagcaaggtggtggtagttgaaataagcaagattgaattttgtattctaaaatcataaaaatgtttagattgtttctctagtgccatttaataagtcttctggcatccagccatcctaggagtaccccacattggcacggacctttttctttaattttttggacatttggcttttttttttttttctattgacttcatgagtaagttccaacttattttctcattgctgccaggatttcttgatattgaaggaaacatggctgaagagaaaatgtggaccaatcatttacgttgatggattttgaccatgctttaggtctcctgaaattatgcgaagtgttaagtatattcttaggagtgtattttgggaagagaatccatagccttcataaacttctctatggctttcatggacaaataaggacaaaagtcgtggggttctgcatggccttggggtttggaggtacatttttggggaccctttagttttaggatgttctatttggaagtaaggactatctgaagtcaggaaaatggttattttttccggaaacaaaacaggaagggaacactagacaaaggagaaatagacacctggaacattaaatcccaaatctctgatttttatcacattaaaacagtgggtcaaggcacccgatgccaagcccggctgcctgaattcattctctgggactgggtagtgaaaggagagaaccagctgccacaagccgtgctctgatctccaggatgatcaagtagttaacttgttaaactttgtcagcttgtttgtttaagttctttattttgatagaatatttttgatcagtgatctgttttgggaggatagcctgatttgggagttggaaactagcgtggataatgtggcaagacatggtcctagacaaacaaacaaacaaacccagtgtcacacgggagtaatcatcaatcagaagaagggataagaactttaaataccttaaataactctaaaattgtgcaacatcaggaactttactgctttctaagcaattactgttgctgtcattgtcattatttatcatcatcatcatcaccaccaccaccaccaccaccannnnnnnnnnnnnnnnnnnncatcatcaccaccaccaccaccaccaccatcatagataacatccacattgtatattcccatgactggatatatgatgtcaatcatacataataaaaactgcccacagatgtaaaggaagggaaaactcaatcagacgaaccttttgtttatgacagggatttggatacagtttctttttttattattctaatttttaaatatttatttgatgtgtatgagtgttttgcctgcatgtctatttgtgtgccatgttagtgcattgcccacagtggccagaaggggcatcagactcctccccactggagttaaagatgcttgtgagctgctatctgggctctgggactcaaacttgcaatcctttgtcttcctaaccactgagctgtctctccagccccttgaaaagggtttcataccagatatgtcacttttattcatggatgaatggcaatataaatgtctcttttgttgtgataaaactcttaacaatgaagctgcacaaggacagggacaatctctgttctgtgaccatatgtcctcggttcccattctagtgtgtgactaaggaaaacatttcattaagtctttattttcctcagtgtttttctttggcttccttttagcttttaaaaaaatagttgtttttacgttctacagatttgctgaaagtcaaatcagtgatttagccactagaaatgacggttaaaatggggccttttttggaatgatgttgttttgtttgaagcaaatgactcaggagacaagatttaattcaacgtaggactatttagacttgtggtgtttatgttagtctgttctctgttgctataacagaacacctgagatggagtgatttataaaggaaatttagttttcctttgattttggaggctgggatgtgcaaatgcatggtgcctgtattgttttgacttttggtgacggccttagggagctttagctatcatggtgggaagcagaaagacaactgggtttgtgtaaagagaaaataaaggggctcagcttctgtagtggctaacctattcccacaaaatacatcaatctgttcactagagcatggctgacatggtctagaacttaccatgctctgctttctaacagttacacatttagagggaaaagcctcaacataaattcatacacttcaaattattgtaggtatgtgtgtgtgtgtgtgtggggggggaggtattgaaaaatatgtaatcttacagacaaaggttctcccctcctctcttctctcttcctccctcccttgtcctttcctctctcttcccctcccctgtcttttcctctttctcttcccctcccatgtcctttcctcttccttctcctccccctaccctctctttctctctctgggtattgaaactcaagccttatgtgcttgaggtaactaatctgtcaaagagcaataccccaactcagctatgttttcagtaaggtattcatttaactcaccccacccacactgtcacaccctccaagcctcatgaaatttcagtgttttctatgctggcctagaacccatgggctcaaatggtttttttcacattagcttcccaataagccggggttacaggtttgtactactgcccctggagaagagtgcttctcaagtagtttattgagtctggtacagcaatgtgggtctgtagttcctggcacttgggagtctattacaagaaggttgtatgaggccagggtctcaggaccagtctgggcaatatagtgcgatccacctgaaggtaaataagtaaacaaacacctaagtataaaaaaaaggtttatttttatttcatatgtgtattttgcatgtatgtgcgtatgtgtactatgtgcatgccttctaaggccagaagaggctattgtttcctctggaactggaattatagttgcttgtgagctgtcatgtggatgctgggaactgaacctgggtcctctgcaaaagtggcaagtgctcttaaccagtgagatctttccagcttcaaataaacacccttgaatctcacatcttagaagagaagtctgtgtggcccacttggatatttacaactagagaaatcagcctgccatggcagaatgtgagtagagatggttctgttttaaaatgtacattcagatggcctggtttgaagaatacccaaagactgactggggacttggggcattttgaacttctctggtcatagaatcgctctctccacattttttttttttacaaatatacagtgagctctggacatgtggatgaaccaaatggtatctttctctagcatatggaatcagagcctggagatacagactacacaacacttttagtatttttgttttgatagcaaagttttttactgtttatgcagttggaatcatgtgacttataatctactgaaatgtaataccattcattctggaatcgggcaagggttgtaataacagtgccatcatctgcttatcagagtcttggggcttttctttttcctatggtagataggttggtattgttgaatattaagtggtttacttatcaaaataagagaattacttttagcttttgatatagtatccattttccactaaggattataccctctggtttgaaggcttagatacggaggagtaacaatacagatagaaatggaaaattagagtcagtttgctcgtgaccctgcaacccagcagtcagctgagtaaggcagaaagagtccttctttactatggggatattttgggcttatctggatttagaacatattttagcagtgctcgtggtaacttctgtaaataacagttgacgctatgctatggatactcctgtttgtgaggtgatctcatgtggtttctgagttgtttatagtttaccctgaaggttcctcatgtgttcatagcttactgctcatttgcaaaatagcgacactttcctcttgtcttattaaactaatggagctattttctagcatatggaaacattttttgtacctcatgttcttttaaccaatgaccccatgtgacttgcaaatgttgtaaaggcagtagctatttccaaatgctttgtgagtgattaaactaatatatccttaggtaccaaaaaagacttcatggagacaaagacggccagaatgaaatatagccgtgctttcaaagaagcccagttctttccatgttaattccagattaaaaaaaaaaagttattgtttgtatcacaccagtattgttacaaaagacttaagagtcatcatcttagatgaccacgtattatgcaacctgtgtgtacaaatttttgttaagtttcacttattaagaaaatgataaacggaattaaacactccaaaacttctgaaatgtagtaatatattttgaagtatcattgtcaatattaaatacacaagagtatattatttcaagcagtaataaacctgtgcctagaagagtaattgaagagtcctgtaatattaatgaggggacacatagtgagagaagtcatgccgagtcttcttacacattctaatgatgcacctggacagaaagcaagaccatttagaaagattagcaacattctgttgaaatgacatctatgtcctgtggtttaagcttgttcctgaatgatgtcttgacatttggctgtgccccaaaatatcttttaaaggacagagctatatagttgctgtccttaaggtggaaaggtggcattcaatattatattaaagttaaggtggcatacagagtttctctgaaacattggcaagaaggcagagtagccaaaggggaggatggggatggagtgccttactgtaccgagactgaagtggggttggacatagggggtttctcatattcaggagcactgcatgtaagatattggtggtagagtgccactctctgaggattctaggagcaatggaaaaattatgtttttttttccaatatgatttcttaatcagatgttcttttacatttcgagcaatacctataagtacatcagctgttttgtggcttgagtatttctataggtattctaatcccacctagtaaagagcattgtcttgagtatcacggaaagagcaagataaataagacattgcatccatctttggagaagtcattttctagcaaggggaaattaagtattcagacatctatacaacagagaggacttgctcgtgggggatgaggcagattcagttcttttggtaatgtgaatgctttatggagcaggggaatgtgaactggacagcatgtgaataacgtggataattaagaaggggtcacatcatggcaaagaacgcagcatgagctgaggtggagctgaggtacaatggcgggccttggcgtggtggaggacgcttagttctgagaacagagcatcctctttgtcttcttcccctttattgttggtttctggaattttgttttgttttgtttttagcccttgctcttaaaccaagaagaaaataaacagatggtatattacttaaatttgagccaccaatatcttcattcagcgtaattgaatattgactatttttaaaatgttaagtatttggtatatgtaagatgattatgagcaagatctaatttctgccctcagaatgcacatacacactcagttatgagaaatttcacttacaaaatatgaattatatcagtaagctccacttctcatttcagtatgtataaaatataagcaagtcaggttgtgtatgttttatattcccactgagactctagacttaaactgttcaatgtgttcatcactaaccacatgtgactagtgaatgaaaattacatactgtgaagaattcagttgcactagttacatgacaagtgttgagtaaccacatgtgattagtgactagagtactagccagcataaatattagttattactagttttgcagaaatccccacagggagacagtgttctagagatgtatagcatattttaattgtgccactcataagtgacctgtcattcatctattgcaccaaacttcattaaataaatgcctgttgtggtagatagtgttgccaacttgacagaacaagaatcacctgtgagatgggcctctgtgcatacttgtggggaattatctgggttatgttcattgggatgggaagacatgcctactgtgggcgtcaccattccctggctggcatcctgcactttaaatggataaatggactgagcctcatgcatgtgctcattattcttttcttctgaatgtggatgtaatctgaccaatggcttcagggttctgctgccttgacttcccctctatgatgaactttaccctgaattaaagcaaaaaaaaaaaaaataataaataaataaacctttccttcttaagttgtttttgtcaaggttttttctttttcttttttggggaggggtggtgtggggggttgagacagggtttctctgtagccctggctgtcctggaactcactttgtagaccaggctggcctcaaactcagaaatccgcctgcctctacctcccgagtgctgggattaaaggcgtgtgtaccacgccagtcatcaagatctttttatcaaagcaacagaaaaagaaacttaaaacagaaattgggatcagaagtggggttattgctgaacatgaccatgctattcttaggcctttggaactggtgtccaggaggaatgtgaaagacattggaacatggggctaaaaaagcccattaaatgctacaagcagagcatgatgggccatgttagtggaagcttgtaagacaagaatgctgagagaattgtgtatagtggaggcttgcttcatgagtttttagtgggagagcaagaacactatcaaaaactgtgttaggggccattggtgtaatattttgggcaagaatctgattcattctgcctatgtcttgagaacttaagtaaagttgattttgaagataatgggctaatttacttgtcagagagaattttaagacagtagattgtaagcaagtgctaagaaagcagctgccattgttaaagtgatcagtactcttaaggagaaatcttagcaaagttaccttgagggtaaaatcccactccttgatgacttcatcttgtaaaaatccatttttattttaaaaaagaaagcctagagctagagagatggctcagtgcttaagagcactgactgttcttccagaggtcccgagttcagttcccagcaaccactttggtggctcacaaccatctgtaatgggatccgatgccctcttctcgtgtgtctgaagacagatacagtgtactcatataaataaaataaaataaaaacaaaaaaaccctctgcatatcattatagaagaagaaggagaaggagaagaagaaagcctaaacttaaggaattccttgctcctcaaaagcagctgcctaggaaagtgtttttccatggtcaggtcagaaactaatacatctgtgatctaaaaggaccagcctctatccacagttagcagctagcttgggaagatcatatatagagagtcctggttttgaaggctgaaggaatcatggtgaaaagctgaggttagacaatgtgtgtcgagagtccctttaggtcctgagaggagattgcatgaagatgtgaccatgtaggctaagatgtgatggagaccccaggatgttagagatgccagaaccactggatgtctgctaggcgagcctcattttgtatgcaggcagagggtttttttatttttttatttttattttttgctcatgattctccatggtagggaatcaaggcaggggcagcttgaagcagctttggtcatattatgtctgcatatgtctgtatgaagaactcaaaagagtagcatgtgctgtgggcagcagagctatcagggtgaggtttcctgagctctttggagcatagccaggttcatcatcagccctaggtgccagataaggagctacacagtttggtatttgccctgctgggttatggtttcgctgtggtgtgattttgttttcctcgctatgccctggtccctccattttggaatgggaacgttctctttgtgccattatactttcaaagtttgtaacttgtttttgattttaaaggagttcacagttaagaaaattggaactgttaataactatgagtacttttatagttgcgatgtattttacattatgagctaaacacgagacttagggagcaaggagtgaaaggctgtggtttagaagtgatgtgtgtggtgtcaagctgataaggggtagagttgtgatggatattgctatcgattcgacagacttctagaatcccctgggagacgggccgctgggtcaggaggattgtctgtattctgttaagtgagctgcccactgttggtactgccattccttggttggcatcctagactgtataacttgagaaaggacatggagtaacacttaagcattccttgtttttttctgactgcagacgtaatatgaccagagctgctttaagttgctgctgccttgatttccccactatggagaatcgtgggcaaaaaaaaaaaaaaaaaaaaaaaaaaaaccccaaaaaacaaaaaaaacccctcttccttctctaagttgctttccttagtgtattttactaaggcagcagaaaaagaagctaagacacttaccatgtgtgttgtgttttgctagagtcaggtggaggattcctttcagtcctgtgagagattgagataaggggaacagatgataaaataggatctggcaagcaccagcatagaagggaaacgaaaatctagaaaggtttgagaagtacaaagcaaaactcaaagtctcgcccctggggaaagttgagtaagtgttggcttggttacatttggcttggttgattaagctgagggagtagaaagaatgattaaagcaatgtaaaacacctggatgcgaaggcgtggcatattggaaggactgaaagatgtccattgtgcctggagcccaggcagtctctaatgtctctgtgcaaagtttttgttttttttttattacgaggcatttcaaaaccagagtcttttctttgtcaaaggaagggaagccttggatgggagaggtgcctgcacctccagccacctgggaggctgtgtcaggaggatcacttgatcctttgcatcggatcaactggccatagggtaacataacacactgtgtcttcttaaaaaaacaaaacatacatccttgatgaaaaaggccctgcctccttcccactatttgggaggctgatttaatattttatatgttttatctatttgtgtgtttatttatgtatatgactgtgtacatgccatgatgatgtgaggaagtcagaggtcaacttgtaggagtttgttttctctgtccaccatgtgagttccagagactgaactcaggtcaggcttggcggtggagacctttatctgctgagccaatctgattgcccttggggggctttttatatttatctcatatttatagatttcacattcaaagaaggtcaagaaaaagtgaaaaagacaaaagctagcggggctggagagatgactccttgtttgagacaagtagagttaggttctcagcttccaaataagatggctgtcgaccacttgtagctccagctccagaagtgttagtgcccctttctagagtctgtaggcacctgtatgctatgtgtatgtgtgcacacgcacgggcgagcgtgtgtgcaggcatgctcgtgtgcattacattatatttagaataattttaaaggtcttcttgccaggcattttattatatcagttttttttcatgaaaaaaaaaaaaagttaaactttattggttatacttcctggactatttgttgtctactcccagttactgtgaatagtctccagctgcatatgtagcagaagaaggcctagtcggccatcattgggaagagaggccccttggtcttgcaaactttatatgcctcagtacggggaaacgccagggccaagaagtgggggtgggtgggtaggggagtgcgggggtggnnnnnnnnnnnnnnnnnnnnnnnnnnnnnnnnnnnnnnnnnnnnnnnnnnnnnnnnnnnnnnnnnnnnnnnnnnnnnnnnnnnnnnnnnnnnnnnnnnnnnnnnnatttgaaatgtcaatgaagaaaatacctaattaaaaaaataaattaaaaaaaagtttaaatacgtcacctttattccagtaaaattagaattgatttttaaagaaggaatgactacaattttacccagaagtaatacattgatttctccatctccctctccacctgtctctgtgcacatgtgaataactgtctgggaggggtcagtcagtgttgggtgttttcagtgacaagattttagatgatttgctgttttggcgggggggggggggcttctgtattgtttgagtatttgtgacaagggcatgttaatgaaaatgttacagtaaatttatcctggtgaaaaatgatgcgtgcatggttttacgcctcagtttcttttcaagttgacttttctttctctgtatttttatcagcagcatagtattttataggtgtgcattatttcttccagtcttctaagtggtagcatctttctcataaataaaacaaattacaactcttttgtttgtttgtttgtttgttttgagtcagggtttctctgtgtagccctggctgtcctggaactcactttgtagaccaggctggcctcgaactcagaaatccacctgcctctgcctcccaagtgctgggaataaaggagcgcgccaccacgcctggcaaattactactcttgaggaagaacctcacatagaatacagaagctatgcaaattagagaattttaaccaggcttcggtcagtttcaccattccctgccccccaccctctcgtttttcttgtgggctcatcattgagctttcacatgctaggtcagtgcactaccaatgagctaaactccagtgattagcagcaatattttaaagttaaaggggtctttgaaaaccactatctttttctaacattaagttcttaactaacatcctactgtcaactgaagtgaatgaaactgagcctagttctcctggtttcctaagttgttgtttccccaaaggtaaacataactgcattttttttaactacagagagaaggttaaagagatggatcagttgataaaaagcacttgctgagtaaacataacagcccgagtttgtattcccagatcccacagaaaatctagatgtggtagcacacatctgtaacccatggctcccacagcaagatgggtgccagatggaagaattgcctggaagctgtgggtcacttgcctgctgtacaggacacagaggcagaaacaagagggaccctgactcagaatagcatggatggccaagaactgtcagagttgttcaactttgacatgcctgtcattgtgcatgtgtgtgcatgcagagacacacacataaatgagtaagtagaaaaataagaggtagacagagaagatattcacatgcttagtgccatgtaagtatcaaggaatgtacttaatttataagcatttcttcaccacaaaatgagagtagctgtttggccattattgaaccttctttaagctccagagaaggaaggcagttacttttaaagaaaaaaaaaaatggaattgactgtggttactgagattaaataaaacaaaagtttcaattggtggagggttagaaaccaagttgctcccaagtatggtggtcctggaggagatgtgtcactcactgctcctatgaagtcgacactccttcagagtggagtgcgcagggaacattgtttctttgtttctggagctgatttatttagttatgatttcaacatgcctacaaggcaaaccccagaaaacattgcacaacgacatgaaccagagcaaacggtgcttttttttttttttttctatacctcctgcgaggtctttaaaataaaacagcagtgaggttgccaccccttctgctccttttccccctcaagttgtttaaatggctccactgatgtctggccagagggtgtggaaggctttagcatcttcagtgctaatacaggttcctgagcaagggagagaattcgaggtgatgcgattccattgctggactgtgcagaaatgagaagcactgtggcctacgcacaccgctctttgcaacaagatctcctgatcttcttgttaaaaaagctctgctgttattgcacatttattttggaaagcaaaagaaattcgacataaaagtgaaacaaatggtcttgtctcatattttctttctacacagccactttgaagagctatcttaatactgtcaggtcttgattctcctggcccaggttaccgttattgtcattatcatagacttgaattaagcacagatgacattgcactgggtacaaagcaagcaagggccttatccttgggaatgtagtaagaattggtatcccagcaaatagctgaataaatctcattaaacagttttccactcatatttcaaacaccagcactcttctgtattctctatctttattaatgacttccgtatcctcttagctagaaaccttacgttcatcttgagtccttaagtcccctaagtttccactacccatctgtcaaccaagtcctgtctcctctatctcagaagtcgtttttgaaagagttcattcccttggcctttgccctggatagaccataccccccccccccccgttttttaaatcactcatgactgttcttctccaagcctcttatctaccttcaacctttcagttttctagtctatcttccacaaatctgtcatatttcttcctttagagacagatctaatcatatttcttgccttaaaaacctttgacgagtctccactaatgtccaagagataatgtagaaagaacttgtcagtctggcttttaaaaaaatatttatttatttatttacttacttatttatatgagtacactattgcttggttcagacacaccagaagagggcataggatcccattacagatggttgtaagccactatgtgtttgctgggatttgaactcaggacctctggaagagcagtcagtgctctcaaccgctgagccatctctccagccctgggctgtggttttatagtgtgggcataacctgcttattcctgcctcattttctaccattaccttctcccctaccctgtgcccaatacatacatatttactctagtctgcccagcgtcttcttatttccctaatcttaccgttttcttgtgcttttggttacaatggtgcttgccccatgcatacagagtccttggccctgactaataatacatttctgctagtattggaagaacgaggaagccaggatttctaaagaatcctattagctgggaatgaatgctatgtctgtcatctaacacttggctttggcaggaagattgccttgaaattggggccagcctgtgctatctacccagtaagtgagtaccaggccagcctgggctatgcagcatgtctgtctcaaaaaggaaaaccaaacaacagcagcaataaagtaatcacagatacaacaatagaaacaaactgtggagcctcaaaagcagaagttagagtcgtcaagcggggttcatactagcctcagacttctgggaaaatcgagaggcagctcttatttttgtagattgagatgaaaggaagagccacagaagattcctggtgtggtaattaggttcaggaattaagagaaaacccatatctacacctatctactgcttctaccgtatctcatttttcaagggagcacagaataggtaagaatcaagaattttcactttaatgcatcttaaaaccaaaagttttggggcagagtgtagctcaatggtcaaacataagcttagctatgtgtgaggtcctgggttcaatctccagcaaataaagaaaccaaccaaacaaaaagcgaaaaccaaaccaaaccacgcaggctgggtgcagtggctcacacctctcatcccagtttgaaggcagaggtgggaggatggttacgatttctgggcccgagtgagtcccaggctagcctgggctatcaagtgagtgccttgtcccaaaagaaccaaaaccaagcaagcaaaaacaacagcaggaaagacctgcagatggtgactttagaatagacctaatgaggaagagtagaagtctttgccgagagaggaggcccgtcctcacccctgtgcctagtcatgcagactcaggggcaacttttcctttttagccacatcttattcttatgaacaattagttttattataaaagtagtgtattaatatatacacatattcagaatgtctctaaagtttcctttaccttcgtcatgacaacagcccctgtcttgtcccacctgcagttgacaccagtgccactgcctttggtttccattcctgccctgaggaacttgtcttgtgcatccttttggggaggttgtgcgaatggctaaacaggcatatgtgggcatgtaactctgccttggtaggagcgttctttacagaaacctactccagctctcatcctgaaaacttgctttcattgaatcgagattttaactatatcattccccattactgcaaacagatgctttaatcatgttatttatttatttatttatttatttttagcttctgacacagtagaatctttggggttctcttaactctatttttcttagtagttgcacatgcacaattaaaaggcaaaaatagggaaaatttagtaagtaggcattaggttcaagactaattaaaatatgaagaaaattataatcattggcttggggagaacgttttccttaaaaaaatgagaccatcttagacactgctggcttcagttcagagaacatcccttgtagcaactctgctaggctcccactcctcaattactgctgatgccgaaaattaagcatcctgggacttggatggcatgtctacatctgctttccccctttctgtatgccctgagttctccctcctcaactgtttcttagcacaagaattcccaaattagttcaagaagtaaacttgaaatctctaaaagaagaggacttttgtaatctttcacagctctgggattcactgaagctattggaatactttcagagaataatacagtttaccaagctgaagctttttgttgttgatttaggttgtgactaattgtgaacatcaataatggaattgatgaaacctgtgccgatcatttgccgccctttcttgaagagtattagtaatgatcattgaatgttccaagcaagcctgtcaagttatttgataatcgtcatattatttccagtaaactcttggccttcctaaatcagactgctagtttgtttttattatatatagctaaggagtataggtgagagagcacctgtaaaaaaggtttgcacttactatgcttttgagtgtcagactctttagaggtaccttaaggtagcagaacagagttggtggccaggtcattactttcttagtgattgtaattgtaagtgccccttgtttaacttggagctggtagaagattatttttcttaactgacccaagtatgctttgtgaagtgataatgaccatcactttgtgttctactcctcaataaagatgcaattgaacgggagtgacagatggctgttaaattaagatcattcttgaaagcaagggtactcagagtagctcacttacatttttacttcttgggggccaagtgtattctgtcaggtagaacactcgtggaaccctgtataaaggctgaggtctcaggccactgcagcagccaatctatgctgtgtgtagttctttccagctgtaatagccccactcctttgctgcttttatggacattaattagctgctgccttttggcctttgataactttgtttctgtatgtttattattattttttttatagaatatccttcatgggttctgtcgtttagataccggctgaataggaaggcatgtcacgtaaaattttctctttgctcagtataatgtattttgtgttagaaatcttgccagatcctctttctaaattccatcttcagtgtttgtgattggctacttgttgttataaaaacatgaaaaagactgattttgttaatgaaaagtaaccagtatattttctcatcaaggaaaaacagttgcacgtaaaataggtatttcttggaggcagaagtttaaaggaattcctctttctcttctttcattttcttctttccaaattgttctcatccatttagtgtagggagtctttcaatgtttggtgtcgtcatggggaacaaaagtgacacttgattgcctgaagtcccatagcttttgctgtgtattttctgcatctggggtctattctgttaccatataaaactattaaacattgcaattcaaaactgtatgtcccacaatcaagtatttataaacacatctgaaacttgtaagtataacccgctctgagatggggaggccatgtttatgatacaggagtgttacattctctctgcaatgtttcagatcaggctcagtggctgcaagacactttgaactgatgttgtctgaaggatttttgtttgtttttcttattcatgtgaacttaaactgtaactgtgtctgactagtttgcagcttaagttatatttcttatgccaacagaatttttctttctgattgtaggtttagtagtatttttcatagaatatgactgtgtgggtaaaaaataaagttattgttttgatatttttttccctctttaactttaggaagccatcagttaagtaggcaggaaggcagctggagaggataaccaggggcttgctctgcatctttgtatctgtttgcagacataagctgactagaagcttactgcttcactacattactgttaaagataatagcgtggcagagtggctaggaggcatcgagctgcatgggctgtgctccagtttgaactgagtctcgagacacctggttcttgttattttccagattgcttctggggaagtctcgtgattgctgagtgtcatgtgactgcatcattctgtctcagaggaaagactgggctatttattttctaactacaatggcatcttaacacattgccatgggtgaatctcatcactctgctttgcctcagtttctccatctgttaagtggctgtgtggtttgagatccatttaatttattggagccaagctttttaaagctgtgtagaactgggctcaatttgaatgaatttagggtataggataatattgccccaatagtgcatccgtccacctttaagaagtctactgtccatttctctatctagaataaaaagaatagttaggcatctaagatagtttgcatgccctatgcatgtcctagctagtaataatagtcttaatcacttttaaattcattatctgatttatttatagacacctataattaaccagtagcacctctgaatcttgatttttatgaaggttcatgatatacttttgctggtgttagacagcaggcagaggactaaatagtctctcagctataaagtctccgtgatattgttatctccattgatagttaaaatatgtttaaaaattattttccctgttcatttgacattattaatggcagtattccctgaataaccaaagaagctaaagtttctttggtgtagttttagaagtttaagacagctgggaagaatgctggctttagaagggtcagctttaaggtattgaggaatgttatgcaaaagaaaattattaggctatctgattttcatgtatgtatttgccaaagttaaaaattaagagactagagtttgtcttagtaaaaacactcatatttttcttcccaaagacacaatgacttcataacatatgtaaaagtccaaatactttatatgcaacatcaaatgaggtgtatctgttttctgattagctttcaaattggtatataccgttggtgtgtgtgtgtgtttctggagaacaaatctatgctttcgtgcatgccaggaaagcattctactactgtgctacaccccagccctgatacatgttcttatttatgtgatttgtttaattttcatttttcagagaaatgttgttagatacaattgtctgaaatgaaacttgatagtcatgttcctatgtgaatgaagagctacttggtcaacccgctcgtttggaaaattctatctcaaaatttgcctatcatgagtgactcctactgttaagggcatgatgcggggcagcactaaacttctaagtccagctcttttcctaaaaatcccagtggccaaattgctttgtttgggggcaacctaaggccagggattggttaatttcttttttttttccattttttattaggtatttagctcatttacatttccaatgctaaaccaaaagtcccccatacccatccccccactcccctacccacccactccccctttttggccctggcgttcccctgtactggggcatataaagtttgcaagtccagtgggcctctctttgcagtgatggccgactaggccatcttttgatacatatgcagctagagacaagagctccggggtactgcttagttcatattgttgttccacctatagggttgcagttccctttagttccttgggtgctttctctaattccttcattgggggacctgtggtccattcaatagctgtctgtgagcatccacttctgtgtttgctaggccctggcatagtctcacaagagacagctatatctgggtcctttcagcaaaatcttgctagtgtatgcaatggtgtcagcgtttggaagctgatcatgggatggatctctggatatggcaatcactagatggtccatcctttcgtcacacttccaaattttgtctctgtacctccttccatgggtgttttgtttcctattctaagaaggggcaaagtgtccacactttggtcttcgttctcttgagtttaatgtgtttaggaaattataacttatatcttgggtatcctaagtttctgggctaatatccacttatcagtgagtacatattgtgagagtttggttaatttcaaggcagcttagtttaacagtgttctagggctaggtctgtgatagctagacccataagggaaaaaccaacataatgaatgtaattagctgcgtctatcaacaagagacaatcagccctgtctggggccactgaagtgttagtagtgaaaattctgcctctacccataagaattaatgatcttgaggattttggattagagcctagaagtgggtttgaatctggcctggaatctactccatacttgtaagtaaatagtgtgctaagttatgaaactagatcacagtgaaacttacagatagggtatgttgtgcaagtgagaagctggctgtaaggagtttcaacagacaaatgcctgcccctaccaaacctaaaccaacaaacaacaaaaattctccacactgctgaagtggactttatgtaaattactcatgctaaacattcgctaaccattcgccttctatatctattcttttgtacttctcatttgatgaaaatttcaaactgtggtttgatggaggggggtaaccccaaacccaaaccacatcggacaaattgaattacaaacctggtgtggtcctttaactcaattacatctaatttgtgttattttagtcatcctgggtggcagctgttttgtgtaaaagcccacaaacattttcaacgtaagaatttgtcctgattacaactgcttacgattggtatttatatcttaagtggcaaaattgtagattaatttgggaccattttgaaaattgaacattttgatgttctttgaataaaagtaaaattgagcattcggtgttcactttaagtgtcaatttttaaacaccccattttcttatgcttcttaagtttagtcttttaaaaacaactgcctaattactttaggtagttaccacacataaaagccctttggtatcttaacccccaatttaggatgatttggaaaggaaaacgtgaaaggttatgaatttttgcatcgtataggtcagtataattaagatggaggactgagttaggattgggtgtggatggagagaggtgaagatttacaaactttaggctttggatcacagtcgtgcacaagcatgaatgacttacagaaaaacccacagaagcgctgccttcagggagcttgtcctcgtcctctcctgcttccctgatctttcttgggcttctttctctagcttgagtctatattagttatctgtcgctgtaacaaattgcttaaaagttaatcttaaaacaaggaccatttgttacccctgtttctggggaccagggtacccatttgtctcttgtgcatgataaagtgagatagtagacgctgactgcctggtagctgcaacctgaggcctttagtgctacacacgtgtgcatagcttcaacagctcctttgctgccttctaatttttgtcacacgtggtttgtttgttgttgttgttgttgtttttaaaccatccactggaaagagactcaagttgctgcctcccttgtgataactaattgtgcctcaccgatctaatcttcagggttagatttgcctccttgacatttaaatgcaaccacaaaccagacttcctccacttgttcaactgtttctctttagaagattatttatttattaaaaatatgcctatgagtgtttgtgttcatctgtgtatgtgtgccacatctgtgtctgctgcccatgaagaacagaggagggcttccatttcctggaactggagttaatgggaagttgtgaccacctggtaggtgctcaaggagccaaatccgggttttctacataatcaaccagtgcttttaaccatgaagccatcaccctagccctcaaccaattttattttaaacacctactttacttaattgcttctactgtagactaaagtccatctaaatccctcagaccacatgcagaaagttccctgtcttgctgtatccctttgcttacactctcctgtctcccctcctgttttttcaattctttacttcttttgtcaacccaaatctcattatgttctttccattctcgtaaagccactttagactgtttctggcccaagtagttcttaaacttcaaattcctgttgtattaacatgtaatgccagcacagtttatttctctatttttaatttgtttaagtgggttagttaatttctctttccaaagagaattccaattttccaaatgcaatatcctttacttcctgtgtgccttttgctgaatgctctgattgagcagctaggaaccttgacttgactgtaaaaccttctccccaggatgctgctgaacgaaggataactcccagagccatgcatggggattagctgactttagtatggtatgcggctacatttcatcagtttcctgatgaattgctgcatgaagagattaattaaagaaaacccttcccctttggctaaccatcagaattggcagttagccttgagatgtcaaagcaaaagtgtacaggttgcctggagcaggacagataggaacactgacccctatcctacttcattatgggctggccaggttcttttactgagataagcagaatttattagataaacaagaaatttacttctattttttaaagtttccatgaatttgatacacatacacaaacacacacacacacacacacacacacacacacacacacgagagagagagagagagagagagggtgagagagagagagagagaagacaaataactgaaatttagtttcatcatcttctcattcactgagaaaagttaaaataataataatataagtttacaacctgaaatagcctgtaaataatgtggctaattgtgttccatagcattcttagtacttttagtacattctggaagaatgagtccagagagcatgccagtgggaaagacagctgggctcttttagtgacgttaagttctgtgcttagctaagacacagctctgtttgcattgttagttttaaccttctctcagttttcctcctcctcctcattgtctcctttgtaccctaaagactcagggagaatatttgcttaaagtcagaggacagaggcacattcatcttcttgttctaaaatggaaaataaggtatttttttcatcagtatgttctgatcatggtttctttttctccatcttatccctgtctccatggctccaataataaagactctctcaaaacccctagaattaaagaaaaaagaagaagaagaagctcaagaaaaactctctctctcttccacacacacacacacacacacaccataaaaacacaatcagaaaccataatataccaacaaaagaccagatgataaacagttgcccaaacaaagcaatatgagacacaaaagtgtacaaatattcagctaagtatggtttgagttgacctactgctgagcatgaagcctaccctgaagtgtggtttatatacatagtgaggctccactggagaaaaccgatttttgaaaaatattctctttctcagggccaggacccatctgactagaacccatgcaagccctgtgcatgctgccacagtctctgggagctcactcgtgagtcagtcccctggtatctggaagtgttttcttgatgtcagtcatgccccacccctctggctctttcagtctctctgcctccccttctgcacagttctctgagccttgagaggacggcttccatgaagacatctttttaggacccagtactccaaagtctctccctctgccaattcttgtcaggttgtaggtaggtctctctgcttcattcccatctgttacaagagggagcttctctgctgatgcctgagacactgattcaacatttgtctttttccattagagccatcgcatagtctgtttaggcttggttttaggattacttataatttgagtctgtgattcaggttattatttgaacatttttggtttccttgtggctaaattactgatgtttatacaaaactaaaacccaacaaaacaaaacaaaaaccagtctctccctgttatttgtgcatatgtgtgtttaaggaaaaaaaaaatccttactctattgcagaaatacttgaattagagaaattcaagggctagaaaagattccaccttttgactattgcctttggtcctttgctagtgattttgggggagtggggtgagggatcatgcccttgggaaagcaagacatacaggatatgtaaatacacatttactgtctagatcaccccagtacctcctgtctgcagcccagccttccatagagcatcctggtgatagccaccctatgatggctctgggttgtcttctcgtgagtcctgtgtgctctgcacaggcaccactcctgctctatagaaaggaggtaaagaaatgagggggagcagcaggcttggggggtgtcaggaggagcctggtgcggctctttgaagagtctgcttagccttctctagctgcccccctccccagccccattccttttcccgacacttcactatttggataaggaatttaaaataaaaattagctcatttgcttacatatttcagaccagttctttaataatctcccatgtcctgaagaatcttacagtttttacttgatttccatctttcttgatcactctgctgtattttatacaaagttaacattccgttctccacgaaaggggaaggatttactgaatgcgatgcttgccacacgaacctttctctaatcaggcttacttgaaagtgtgtatttcactgagtggcatttgcaaattgttttcctccctaccccaccagagctgacaatataaaaatgcttccatatgccgaaagctggccgatttatcttgctagcagggtgtgtgttcagggtggggtgcagagggggcagtgtactttactccctggttatgatataaacatgaaactgcgaagtgcggaggttttgcaaggaaagccctgagttcactgggaacagctctagagccccgaggcttcactgctgttagagataagtgttaagagttgtttttaccccacaagagtaaaatttaaaagtgcaattatgatttgcatatagcttgaaaatatttaattgagtacagttagaacagagcattcaattctaattttgaacaggcctgaacattttaagtaaataaataattttgcttgactacctcaaggcatttcagagctgccactggaggctccgtgatcttcccagagttaactgttcccctctccacctgctctgcctggtgtcaccagcagagtctaaacgccacgcccttctttacactgattctatttaccttgtcccctcaccatttctccacaagcctgatttatagtttcctccagagcggtggttctcaacctgtgggcatacttgtcattggtaaatgtgacggtcacataatttctgcaagtaaacaaatgggctgagctaggtgcctctatggtgtgtgtgtgtgtgtgtgtgtgtgtgtgtgtgtgtgtgtgtgtgtgtgtgtgtgtgtagatttatgtgcatgtgtgcatgtgaaagccagaggtcaaccttgggtattgttctccatcattgtctaccttgttctctgagaccgagtctctcactgagacctagagcttgcctaggttaacccagatggccagcaagccccaggtctacctgaccctgcattcctagtactgagagtccaagcttgaaccacaccatgctttcttccccaagtagggttcgctccagccagagctaggtgtttattaaaaagatttcatttgttcttggaagtcatagcaaccccttatgagtaagttaataataacttgcccatctctctgaatttatttcataaatccagaacacattatggattattcataaacattgttggtttatttactggaattctttcaaagtcactctttacctgaggcattagtaaattatcctcctcttcctccttgtttgtttgtttgctaggctggttttttttttttttttttacatcttatttttgattgatgtttaagttagcatgcaaagcagtgggtatcattacggccttttcagacatgtgtgttctcatacatttttcttgttcgccccctcccaacactcctcgcttttacattcaaaccctttccaaatctggtaccaagctttcttcttcctttttcttctctttgaatgtggtcttcacattttgtccttgttggcctagatctcactagctcaagagatcgtcttgcctaagcttcctgagcagctggaactgcagatgtgtatcctggctcttctataaggtcttattttagcttataggttgattaaggtagaatcaacctataattaatttcaatttctttctatagaaaaaaattgaaaaagtataagtatagtacaatcaagtcttataagccattcacacatttttatctattgttcacagtttgttgctgtttctcttagtttttgaaatgcacacatatacatacatgcacatatgttagcaatgtacctttttttctgaaccacttggtatattgcagaggttatgactctttgctataaatactttaatgtgtatctcttaagaataagtatagtttttttatactattgtggtatagtgatcaaattcaatatattattattcaatataaagtttatgttcaactgtaacctcctgacccaatatgaacatatgtattaacatttcaccaacctcaatattgagagaaaaatatcactgtcatatctctttagcttcctttaatagggcagattcttagcctctccttgccttttccccatttacacttactaaactatgagctcccatttttgaataatgcgtcattgagatttacataatggttttcactggatctttctttctggatttgaatttggttgtgtgcacctgcatgttacatgacatttttgattatattgtgcctttctttcagatcatacaatctttgtggtcagatgattcatccagttaaccttcattctccctatttccaagcactcgtgctacatgacttatcataaaaattaaatgtactcgcgtcgcgtgcccttgttctgtagattgtggtgcagctttaacacacacacagcaggtcagatgagctctcagaaattaaggctgtccaaggctgtccaggagcaatggaagcatgaggtcttagtgttttgagtattgaagggagttggatagtacaaagcataatgcccaggacgtgcagggaacactgggaattctgagctcactgacgtgtgctgttcatttttatcctttctttgaagaaactgtttgcgataggatttgactaacttcccataggcaggttccaagagtgttgccaggtgatacagcatcttagtgagcagtgacattagggaagacctttgacttttacaatacgattttcaagagtgaaaatatcttacattgtggggaaaagctgttttgttttgttttttaaaactagccatttgttatcaaataaacatacaaaagtgactcactcaaagttttgaataagatttcaagacattttccatattgaagtcagaatctgagaggatacttgtgggaggccctgatttccctgaagctgttcccttgcttggaaggctagcacaagcttacatttattacttaagaccatttaggattttaagtcttcagtatttaggaacccttaaagcactcttttgcctgtttcggtgaggaacattcgctacccgggttctttgctccattgccttttgcagccatcatctgggaagtcttcttatctcacgtgaacgtctctctctgaagttctgttctgatgctctgtccttctctacttactggggaactcctcatcactcagcacatgtgtcaggccagagtcagaggagtagcggctgacattctccatattgtggtttgtctgtgtgcatatgcctgtggataacttggcaatagcttcccagtgaactaacagccagtgcagttcagccaaaggttagagcaataaagtaattgaagtgggcgtctgtctatctatctatctatctatctatctatctatctatctatctatctatctatctatttgaataatcccaagtgacactactgtttgctgtttatcattgaactatggagtctagttatttatttgaataataccaattgatattgccattggctgtttttcactgaagtgcttaggtggtaggtagtgtttcatggatatagcagatattaaaaacaaggcaagcaaagaaagaagcactaacaagtggggggaattcagatgcctactctcttggcatagtctgaggacctttccagtaactcagacactcagagcacagaatctgatgtggaaaaaaaacatatcccgttttttctcagagtcaaatttaagagaaaatgactttttcacagatgtgacttgagcacattttatatgcttgtgattttttcttaagtaggcttctttggggcgtatttcaactgcagtagaagaggggtgtgattcaccaaattgtgtgaattaaaggcatgatcaaggaacaggccattggaaatgatggccccaccgttttaaacgctctttgatcttttgttttgacacgttgaatttatctttaattatatgtgatgacatttgattactgtacacttagactattataatgtggcttgtaaaatgtagtttatagtatgtaataacttcagcgctcctctttctatacttatgaatttgcagagtgatgttttgtgtgagtgaaaaccattactcttcggaattagcagaatttcaaaacgtaaaatcctcaacacccgggcaaaatctgatccctatatactgaggattgtgtctgggctctctggcacacaggctctccttatagtggcaacagaatgatgtgtggtggtttcctgatgtgttcaataattgcctgctttccttcaggaaaatcacttaagttcctcaaacctttgaaaaccgaaaggcttagtgtagatgatagtcaaagtcttggttaggaaattctgtgattctcctccaatttgtttgtagacatactgtctccacatatgataggcatttcagacacatttttctagaaggatatttttaaaatactgcagaagttaatgctttttctctctctgtgtttggtagagaaataagatgctggaacagggcaaagagccttttttgcttcctctggagggaggggctctacataggcttcattggagcgaaggttcgcttggagtttcccatgttatgctagtaccattgcctggaggacttgctgtttctctttgaaatctgctttgcttgcatttacttgctcagctttgaatttatcccagttttggcagttgcatggcctacctatgatgcgtctttttaagagtttaggtttgatcctaattaactagggggaattacaaagttatccttcctttgcaaatagcaattctctgagtcatttgacttttaacgttatttaataaattttgtttattttattttcttcttctttttatttatttctttgacctttctacgtagccatcggagaactcatttatagatcagcctggcctcgaacgcacagagatctgcctgcctctgaaagtgctggtattaaaggcatgcatgccactaacacatggctttctcatgtttcttgtagggaagtcaatcaaaagaaagaaaattaacaactaagaaaattctgcaaggccaggaacgtagttactgaatcctgtcagcaggcatgtccatgtgcctttacaccaaattttgctttttttctccaaataaccaattcttttgtttgctcagggggttgtcttttattgtcaaaactctgttccaaaaaattattgagtgtcactatttgttaggcagtagtgctctaacagctaggcagtggtgctttgaattccttcactgtggcatctcagcatgctttggtttataataagttcttgtctgtgataaggagttgacagcttcaaaagcccaccctcttgaacaagctgttgcctggcagccacagaggaggctgtttttttttttttgatttagagtatggctgtgctaagggttgaacatttgtttttttgtttgtttgtttgtttttaagagaaggaaagaaagtgaatcagacttttttttttttttttttaaacctaggctgattccctgacttagcagttaagaatagggtggcaggaaacatggctgtgcacatgtctgttgaatgctgcctttgatcctctagctatgttcccaggaccactatgcatatggtggttctatttttggtaattttgaggaacctccgttctaatttctgtagttgctacactaatttacaatccccaaatagtatacaggattacccttctttgcatcattgataacatttgttgttgttcttctttttcttgttcttcttgctttttgttttgatgctagccattctgactggagtgagatgaaagctcagtgaaggttgggtgtagtggcacacaactttaattccagcacttgggaggcagaggcaggtggacctctgagctcaagtcagcctggtctatgttgataaagagtttcaggtcagctacagttttgtagagagttgatgcgatctcaaacaaaaacaacaacaataaaacaaacaaagaaaggataaaaaagtttaaaggaagtctcagtgtagttttaaaacatttgattgtatgagtgtatatgcatgtgtatatttatatgtgtgtgattatgtatgtgtgcacatatgtatacatgaatgtggatgtcagagatccacatcaggtgtcttctgcaattgttcctcaccttatttgttaagacgaggtctcttgctgaatctgaaaatgttaattttttttcctgtctctactcataactaatatctccctaaatcccaaatcacagcttatttactgcattataaacccgtccttagtaaattctatattggccaagccaggtcttgttaagcccttcatttgttcatctagatctggctggggcagagtcccttgagctgaaggtagaaaggtgggggttgaggaggagagcaggacagacaccagggtgcctatgaaggttgtctgtcttgctccctatagctagtgaatttctgatgaatcttcagtagaaccaaggttaggtgattttgcagatatttgttaagtacttagaagcaacaaatgatgatctctaccaacctgagtttaagaaaaagaagaaaaaattgggctgattgtatctttttttttttaaagtttctttgaaatttgtgttttttgtgtatgggcattttgccagtgtgtatgtctgtgcacgatagtgtattcctgagttcacagaggtcagatgatagcctcagattcccagaattgtactttcagatggttagaagtttctatgtgtgtactgggaattgaacctgggtcctctagcagagcagccagagcttttaactgctgacgcatcatcactttagcctctgattttaatctttaaaaaagattaaaaaagtgtgtgtgtgtgtgtgtgtgtgtgtgtgtgtgtacacgagcacctgcagagtcagagatggtagaaccctctgaacagtagttacaggctgttgtgaactatcagatacggatgttgagaacaaaacttgggtcctctgcaagagcagtatgacccttaactgcagagccatctctccatcctctgggcatttttcttctctagacttatttgctcacagtctctaagaatctgacttttatgaatctttttgacttgttgtattatatgatatcactgaggttgataagagagataaggatgatacagttttatttgatatgtaactggttgaataaccacatgaaagcagtaacagacttatgttagcctggaacaaggtctcagagatagtacaggactctctctccattttcctgttacataatgttatgaataaggagttaagaaaatatagctgtgtgttgattggatttgtagttgatacatacttgggaatccaaaagggtaaaaatgctgagctgatgagcttgaccaatataaaatttgaggatgagcctataatgtaataatgtatatagtcctgtgcgttttgcaacacagggatgatttagatgtagtggtagaaagaaagatctgacatttttcacttaactgaaaactcagcatgaacaactttgtcatgttcctttacaaaaatgcattgtgatcttggactacctttatagagtgtctagagcaagggtgatgacagcctttcaaattctgcatcagattattccgattgtcacattctatcagtgatgagcctcaagtccatctatatgacaatagctaaggcagtaggggattcccccagccccatgtggccaggctaaagaatgaaggacttgcctataaggagtcatatgattatttccaaatatttactttgtaattctagaaagggaggctagaannnnnnnnnnnnnnnnnnnnnnnnnnnnnnnnnnnnnnnnnnnnnnnnnnnnnnnnnnnnnnnnnnnnnnnnnnnnnnnnnnnnnnnnnnnnnnnnnnnnnnnnnnnnnnnnnnnnnnnnnnnnnnnnnnnnnnnnnnnnnnnnnnnnnnnnnnnnnnnnnnnnnnnnnnnnnnnnnnnnnnnnnnnnnnnnnnnnnnnnnnnnnnnnnnnnnnnnnnnnnnnnnnnnnnnnnnnnnnnnnnnnnnnnnnnnnnnnnnnnnnnnnnnncaagttctaggacagaggacagtcagggctacacagggaaaactgttttgaaagaaaggaaaaaaaaagaaatctttaaaaatggatgaaagaaagacaaaggggcagtggtctagactgtgctggcaattacctagtacagtcttcagggtggtgttaacccacctctgggcaggaagcagtaaatgaaatttactcatcaaatagcaagcgaaactaattgagttctgcatttaagctgtgttctttctggtagtgtattctctacttattcacaattaatcttattctctgtcattctactaagaaacagagagtgtctgtggccaaaaattgatgcaacaggaatcatttgtatatgttgctattcaaacatgcctttctgttttgcaagaaaccattcctgtgaactcatttctaaatacatttctgaagtcaaaaggaggttaaaaggggaaaaaaaaaacctttcaggaaatgttactcattttttacacacttcatcaaaaccttggtgatcatattgcagccgttgagaagataatgctgtgaaatcaagcaggcatgtcagaagaaccaagcttgctctttatttattagttgtatttaccgtgcattaatgtatagatgctgtttggctaacttcagtcattcccctgggtcctagggaagttggtatttactgaattttctttgaatgtttattaaaaatcttatgttaggcttctcacaatgtcaagtaatttttttaaaagattatttatgtgcatatactgtcactgccttcagacgcaccagaagagggcatcagatttccattaaagatggttgtgagtcaccatgtagttgctgtgaattgaactcaggatatctggaagagcagacagtgctcttaacctctgtgccatctctttagcccctgtcaagaaatgtttaatcaagataagaaatattactctttttatttgtactttttatgatgtaaagttgaaaactataaataccagaaatcttgatcttaattctatatggtagctattagatgtgctcacacaaaaattcacactcaatgtctgtcttttttttttttttttttttttttttggggttttcgagacatggtttctctgtgtagccctggctgtcctggaatcaatgtctgtcttaactgaattctaaaagagatcttggtcatttatagttgtgaaggaacaagaaaatgttggttgaggggcttaaaagtacacactatctagtactatttttaggatgaagtaaagtattcttgttctcttggctaaatgtgattaaattttggtatgcaccattgttatgtcaacaagaaggatcttgaaatgagaaaacttgaaatattaaaccaacagtagtgttgcctgtataatgttaattctgcacatattcagtggttacatggttaagtttttttttttccttcaggtttgtttttattttatacatagaggtgttttgtctacttgtatgcttgtgtaccacctgtgtgtgcctgtggaggcttaaggtggacatcagtaccctagaactggagttacaggaggttgtaagccaccgtatgcgtgcttataacagatccctcaccctctccaagagcagcagttgcctttaacactgagccaactttccagccacaaaagtgtgagttttaataaaccctaagctattctgatggcatgctaacatttgagagtcactcctgtaggccccatttaggcttttctgttagggtccgacttatagagtattggtgtgatgctctacatgttgactgaggtctctatcttcttggccaaaatatcccatactctcttctttttttttattaattaagttatttattttatatccagatctcagcttccccctctcctaccttccagtccctccttccagtggcccctgctatccagccttcctacccttttcttcagaaaagaggaggcctcctatgaatatcaaccagccttggcatatcaagttacagtaagactaggtgcatcttcttcttttcaggctggatgaagcattacagtcaggagaaggggatccaaaggtaggcaatatagtcagatgcagtctctgctcctgctttaggagttccacaagaagacccagctatgcaactgttacatatatggagagggcctcggtcagtcccgtatgtattctctggtcaacagttcagtctctatgagctcagattggttgaatctgtaggttatcttgtggtgtccttgacccctgcttctccctcttccacataattccccaagctccacttaatgtttggctgtaggtctctgcatctgtttccataagctactgggtgaaacctatctctctctaatgatagttatgttagacccctgtctgcaagtatagaagaatataattaattatgtcaggggtgggctccatttcatgacatgggtctcaagctgggctagtcattggccctttcctcaaattctgcctcatcttttacccttgctcatcttttttttttccccttctctattggatatttgctttatttacatttcaagtgttatcctctttcccattttctcccctgcccctggaaaccccctatcccatcctacctccccctgcttctatgagggtgttcctccacccacccacctactcccatcttcccaccctcagttcccctaccctggggcatctatcaagccttcatagaaccaaggacttctcctcccattgatatatgacaaggccatcctctgctacatatgcagctggagccatgtgtactactttgttgatggcttagtccctgggagttctgggggcaagctagttggttgatattgttgttcttcctatgcggttgcaaaccccttcaactccttcagtcctttctctaactcttctattggggactcgacactcagtccaatggttggctgtgagcatctgcctctgtatttgtaagactctggcagggcctttcaggagacagccatatcaggctcctttgggcatgcacttcttagcatccacaatagtgtctgggtttggtaactgtatatgggatgaatccccaggtgggacagtctctgggaagcctttcctttagtctctgctcaacactttatctccatatttgcttctatgagtattttgttctccttctaagaagaaccgaagcacccacactttggtcttccttcttcttgagtttcatgtggtctgtgaattgtatcctggttatttggagcttctgggctaatatccacttatcagtgagtgcataccatgtgttttcttttgtaattgggttacctcacttaggatgatattttctagttccatccatttgcctaagaatttcataaatttttgatagctgattcatactccattgggaaatgtattacattttctgtatccattcctctgttgagggacatctgggttctttccagctcctggctattattaataaggctgctatgaacatagtggagcatgtgtccttattacaagttggagcatcttctgcccaggagtggtatagatggatcctcaggtagtactatgtccaattttctgatgaactgctaaactgatttccagaatggttgtacaagcttgcaatcccaccagcaatggaggagtgttcctctttctccatatcctcgacagtatctgctgtcacctgagtttttaattttagccattctgactggtgtgaggtggaatctcagggttgttttgatttgcatttccctgatgactaaggatgttgaacacttctttaggtgcttctcagccattcgatattcctctgttgaaaattctttgtatagctctgtaccccatttttaaatagggttatttgattctctggagtctaacttcttaagttctttgtatatattggatattagccctctattgggtacaggattggtaaagatcttttcccaatctgttgattgcctttttgtcttattgagtattctttgccttacagaagctttgcaattttatgaggtcccaattgtcaactcttgatcttagagcataagccattggtgttctgtttaggaatttcccccctgtgcccatgggttcaaggctcttccctactttctcctctataagtttcagtgtatctggttttatgtggagatccttgatccacttggactttagctctgtacaaggagataagaatgggttgatttgtaattttctatatgctgactgacagttgacccagcaccatttgttgagaatgctgtctttttccactggatggttttagctcttttgtcaaatatcaggtgacataggtgtgtgggctcatttttgggtcttcaattctattccattgactgtaccaataccatgcagtttttttctttctttttttccttcctttcttttcttttcttttcttttcttttcttttcttttcttttctcttcttttctcttctttctttctttctttctttctttctttctttctttctttctttctttctttctttctttctttctttctttctcactattgctctgtagtacagcttgaggtcagggatggtgctttccccagaattttgttgttgttgagaaaagttttcactatcctgggttttttgtttgttattccaaatgaatttgcaacttgctctttctaattctatgaagaattgatttgaaattttgatggggattgcaatgaatctgtagattgcttttggcaagatggccatttttactatattaatcctgccaatccatgagcatgggagatctttccagatcttctttgatttctttcttcagagacttgaagttcttatcatacagatctttcacttgcttggttagagtcacaccaaggtgtgtaatattatttgtgcctattttgaaggtgtcatttccctaatttctttctcagctcgtttatcctttgagtagaggaaggctactaatttgtttgagttaattttatatccagccactttgctgaagttgtttatcaggtttaggagtttctggtgacatttttttgtcacttaagtcacttaagtatatgatcataacatctgcaaatagtgatattttgacttcttcctttccgatttttatccctttgatctccttttgttgtctaattcctctagctagagcttttgttgtctaattcctctagctagagctttgagtactaaattgaatagatagtgagagagtggccagctttgtctagtccctgatttaggtgggatcgcttctagtttccctccacttagtttgatgtttcctactggttttgtgtatattgcttttactatgtgtaggtctgggccttgaattccaagacttttaatgtgaagggatgctgaactttctcaaatgcttgttcagcgtctaatgaaatgatcatgtcgttttttttcttggagtttgtttatatagtagattacattggtggatttccatatattgaaccatccctgaatccctgagatgaagcctagttgatagtggtgaatgatcgttttgatgtgttcttggattccgttggcaagaattttattgagcatttttgcatcaatgttcataaggaagtttggtctgaagttctctttgttttgtctttgtgtggtttaggtataaacataattgtggctttatagaatggattgggtagtgttccttctgtttctattttgtggaatagcttgaagagtattgatattaggtcttctttaaaggtctgatagaattctccactaagcccatctggttctggactttttttttttttttttggttgtgagactagtaatgactgcttctatttctttaggagttatgggtctatttagatggtttatctgatcctgttttaactttggcacctgatatgtgtctagaaaatcatccatttcattcagattttccaatttagttgagtataaacttttgtagtagtttctgattattattattattattttttttggatttccacagtttctgtttttatgtctcactttccatttctgattttattattgtggatactgtctctgtgccctctggttagtctggctaagggtttatctatcttgttgattttcttaaagaaccagctcctggttttgttgattttttttttttttgtatagttatttttgtttctatttggttgatttcagccctgagtttgattccccaccccacccccgccttctactcctgttgggtatatttttgttctatagctttcagatgtgctgtcaagctgctagtgtaagctctctagtttctttttggaggcacagctatgagttttccttttaccattgcttttattgtgtcccacaggttttggcatgaagtttcttcattttaattaaaattttaaaagtctttaatttcttccattatttcctccttgaccaagttaccgttgagtaaagcgctgttcagcttccatgtgtatgtgttttctgttgtttttgttggaatttaagactagctttagtctgtggtgatctgatagggtgcatgatattatttcaatcttcttgtatctgttgaggcctgttttgtgactaattaatggccagttttggagaaggtacaatgaggtgctgagaaaaaggtatattctttttctttaggatgaaatgttctataaaaatgttctatagattcatttggttcataacttaatgtggttcagacacattcatagtttgactgtgtctctgttttgtttttgtttctatgacctgtccattgctgagagtgcagtgctgaagtctcccactattattgtgtggggtgtgatgtgtgctttgagctttagtaaagtttcttttattaatgtggataactttgcatttggagcatagatgctcagaattgagagttcatcttggtagatttttcctttgaccagtatgcaattgtccttccttaccctttttgataacttttggttgaaagttgattttattcaatattagaatggctactccagcttgtttcttcggaccatttgcttttttcccagccttttactctgaggtagtgcctgtctttgtcactgaggtgcatttcctgtatgcagcaaaatgctggactctatttatgtatccagtctgttagtctatatctttttactggggaattgagtccattgatgttaagagatattaaggaatagtgattgttgcttcctgttatttttgttgttagaggtggaagtatgtttatgtggctatcttcttttaggtttgttgaaagattactttcttgctttttctagggtattgttcctctccttgtgttggtgttttccatctattatcctttgtaaggctggatttatggaaagatattgtataaatctggttttgtcatggaatatcttgttttctccggctatggtaattgagagttttgctgggtatagtagtctcagctggcatttatgttctcttaaggtgtatatgagatctgcccaggatcttctagctttcatagtctttgctaacaagtctggtgtaattctgataggtttgcctttatatgttacttgaccttttttccttattgcttttgatagtctttctttctttaatgcatttggtgttttgattattatgtgatgtgaggaatttttttttctggttcagtctatttggagttctgtaagcttcttgtatgttcatgggcatctctttctttaggttagggaagttttcttctataattttattgaagatgtttactggccctttaattttggaatcttcattctcttctatacctattattcttgggtttggttttctcatcatgtcctggatttcctggatgttttgggttaggagctttttgccttttgcattttctttggctgttggatcaaagttttctatggtatcttctgcacccgagattgtctcttctatctcttgtattctgttggtgatgcttgcatctatgactcctgatctctttcctaggttttctaactccagggttgtctccctttgtgatttttttattgtttctatttccatttttagatcttggatggttttgttcatttccttagcctgtttgattgtgtttcctgtaattcttaaaaggatttttctgtttcctctttaagggcttctacttgtttacctgtgttctcctatagttctttaagggagttatttatgtccttcttgaagtcctctctcgttgtcatgagaagtgatttttgatccaggacttgctactgtgggagaattgggttctgatgatgccaagtaaccttggtttctgttgcttatgttcttacgattgcctcccgccatctgtttatctctagtactacctgctttcactatatctgagtggcgcttgtccttcctgtaatcctggttgtgtgggaattcttcagagtccagctgtctctatgatcttgggattccaggatcctgtgatcctgagattctgggtgtgtcagagttcctgggagtcaagctacctctgggaccctgagaacctggtgtgaccaagctcctgggataatgggatcatgggtgtgttagagcgcctgggaattgagattcctctgggtgctgtgggactagctggggagttagtgcccaaggtaaacctgcacagattggaaggaacctgaaccacaggtagggtggggtttctgagtccctgtatcctgctggtcccagttattcctggtggtgttggaacatgtgttgtgtcctactcaccactgatcctatgatcctgggtgtgctagagcgcctgggagtggatccttctttgggtgcagtgggactggctgcagagttcacacccaaggtaaagtggcacagaccggaagattaatatcccacactcttgtatgagttctgaaaaatattttactctaataaaaaggtgctattcgtggtattttgcttggctctgccttgcttgccctgtgaacatgcagtttatttttcacctccaatctcctgtgtgcagtcatgtgagccatcactgtacagctcccttctctgcactgttccatctctttctaccctaggaagtttgccatcctagcataactcgactctgtagtctggctgtgtttccattctccggtatgctctaggttgatttgggcttaattttcattcttttatagattacagttctatatgacttttgtggcaataatccttttcaatattttttattaattatgttattatttgcagtaagattacacttacggcttcagttagactgttaacgctggaaatcacaagtgctttatatgggtgtgtggagggggtgggtgtacatgtgagtgtacatgtgtgcatgcttgttgaggcctgaggtcaatggcaggtgtcttcctcagtcatttctccattttaatatttgagaaacggtctcttattaactctagggatctcctgtgtctacttaccaagtgctgtgattgaaggtgtacagtgctatgacaggcatttatgtgagtgctggagatttgaactcaagtccttatgcttgtgtagccagtatgccaagtgtgccatcttcctagcctcctgcatacttactagttttatgatcataaagttataaaggagctaatcacatgagggaattaacattgtattaatttctccaggtcgcttctgtggcatacatgatgcacagtgcatatgttctgacagtattcagatatggagagagggctttgcctctaaacatctcataacctacaagattacagtggtgtataaactcattctgattgagtttataatataaagactccaaatagagccacagtgacattgtatgaagatcatggacattgaaatgagataatcttcattcaaatctgtgtcactggagttctctaacctctcttagtttccatcatgtatcgaaataataataatttgtggaccttaaatcaacaagattaagatgattgtttttgtaaaccttggcaggtagtagagattcactaactactggtttctttatccttaaagtacatttaagatatagaatcagttaattttattactgcaacaattttcagggtagaattgacatttaaattgtgccttggatgtcgggtaggatattgatatacaattgtaaacccctccacatgggtgctgggaactgaactcaggttctctgcaagaacagtgctgctgagccatctctccaaccgcattcactccacttcagtgaacttccattaacctcagtgaacaagtgttagaacatgtaactagtgggaagcctgcatatgtgcttatggagtcatagtctagaacttaagaaaagcaatttagtttagcaatatagtcgtggtttatgcctctattcccagtgctggtgagactgaggcaagagcattgtcaggagttccaaagtattttgggctacaaagtgagactatcttaatgggcaaacaaatgaatgaagaaataagaaaaagaaaacaaaatcaaagtggtgggtaaataaagatgaaaggcagtatcaacctaggccattcctgtttactgccattactaatacattggggaggcttgtgggagatgtgtgagctgatgtttcgtaagccactgttccaggctgctttacacaggtgagctgagctgatcaattcattgacttgcaactgcagagcaccctccctcatcgcaggaccatgttgctgagtgctttcttgtttgattcctgtctgccctctgcctgttaggttgcttctctaggctttctgaacggggatgtgggaaatttccagagcccttcccaaactctggcttgctctcttggtatgagtgctggcatagctttgtaaaattgtacctaatgctttttctatgctccttagcatatggaaccgaaatgcaacatttgagttcactgagattaagatttgccttgaggttttgtttgtttgtttggccttttgaggctggagctcagtggtggagcatgtgaatatccagcactgcagaaagaagaaaaagacaggttcccccccacccctgttttttaagttaatatttttttgtactatgaagagtcaatgacttcttggcctgtttggtcagtttgtccagtgagtaattcatctgacctttggcttaatattatttgttttgaaactctagtaatgtagaagacatgacaggggagtgttttttttctgacacagataagatcagaaacgggattaattaaaaaagccaaatgccacctttgaaatatgggatttggtgttttaaaaagaagtccttgtctgtgactagtgctgatcatttgggaatctgtctctctgttaaatgctgacacttgaagtcctcttgaggatgtattggaattactttgagtttataagctaaagatattattcagtcatgagaatggtttactttcttatttaggagtttttaatgccaagttctgtcaccaaagacctggcacattatttactcatggcttttccatattcatttattagcaggttttttttttttattacacaatcaaactgatctatcagaaagtttgttttttttataggtagatttggggtcagaaaccctagctttcctaagttgttaaagtggtttgtaaacttccttgtggtttccatggggagaatcacgtatgcagtggaaattcttcggtccagacgtcatactttatcattgtagctatgcccagtgattatggggtcttgttttgtcctgatgtgaaaaacactactgacctggagctcttcaggctagaaagttctgttgctggtaagagttattttttccttaagtaataagtcaatgtggggttgcataaatgtctttctagtcaaaatgataaaccacatggacttttgctcttattctattaatgtataaagtttattaatagatttttctagcattgaaccacttatattctcagataaaatggttcatcagtagatttctattgtcattagtttctaggaatgaacgacctgtagattttctctccagcagtgaacctttagagatcataggataagttggtagctgtgatgggtgatgccagttctcagcttggtaggatctggagtcacctgggagtagggtctcagtgagggtttaatgaggctgggttcgtctgtgggcacttgctttgagggctgtagttgatctgggaaggttcatcttgcatgtgagcaggattccaagctgtcgatggagggcaagcgggctgagcatagcatgcacttattctggtcttctgactggggacagaatgggaccagtcctgctaagctcctgcttctatgacctccttccctgccccgatggacaataacctggagccctgagctaaataagctctttctcctttgcgtttcttttgttcggggcattttatcacaccaaggggaaaagaaactgatacaggagcttttccttattttctcttctctgaaaaatcccagacaacagaatttatctcttcgtgaaacctttaagcacatgcctggtggagtacttaggtgagtgttgcttttcttcttagaagaagttttagttgactctgattcacatctaagaagcatatgcaagccatggctgtgcaggtctacacgttttcaggataaaccaaacaattctaggtaatcagaatcacatcaacaaagtgaaaattgctgggcgtggtctcacgcctttaatcccagcacttgggaggcagaggcaggcggatttctgagttcgaggccagcccggtctacagagtgagctccaggacagccagggctatacagcgaaatcctgtcttgaaaaacaaacaaacaaacaaacaaacaaacagacagacagacagaaagacaaacaaacaaaaaaccaaagtgaaaattatgcagaagcccctgtcatatgtgcctttagcccctcccgtccctcagagtgaccgctgtcccccagtgtctgaaccacagatgaggatttttgtctgtttttaaactgtatctaagtagggccatgcaggatgactttctatggattgatttcctacagcactctgtgagcatcactgtgttttcttagtgctggtggtcccttcgttctgttgctgtattgcattttatgtgtgtattaaactattcatggaggctttggtgttttccatgttttgtctactaaaaatagggccgtgaaaaggcctttttgcaaacatatgtgtactctgttcaacctaggaactgaattagtggattgttaagtgtgtgtatgtccagctttggtgaaattgccaggtcagttttgaaacaatttatatgccctgaccaacagcatttgtatactgatccttctacattctagttagaactggtaactattttagtcacttgaaagggtttgttggttgtccgtcttcgttaatgttctattgctgtggagatgacaccatgtccagagcaacactcataaaagaaaacactaactgtgggcttgcttatagtttcagaggtgacttcattatcatcttggcggagagcttggaggcaggcagggaggcatagtgttgagaagtagttgagagctttatatcctgatcttcatgcagcaagcagagagagagagagagagagggagacagagagagacagacagatagacagagagacagagcaagcaagcaagcaagctcaggactagcaatcagctgaggactacgcatgcaagctcattccggctgcctcactatcacagtgtgctggggcttgcatttctttggtgatttccgtacataaacacctttccatgcacttaacttcttactgctcatttataatttctttgataaaatgtttgtgcacttttttttgtagttcagtggataaagtgcttgccctgcttgcacaaaaccatgagtataaagacaagtataatctcaatacttaggaggtggagacaggaaaatcagaatttcaaggtcacccttggctgcatagtgagcttaaagtctccagtacatacatttgtatgtgtgtatgaatctgtgtgccagtgtttgtgtgtgtagttgatttttattttgttcacagttatacaaccattgccactaccctatcttagaatatcttcatcatttcaaaaaagaaactttgtataccttagtcatcactctacatttcttcctccctgagcccctgacaactcctgatctacttcctgcattatgttttggcctcttatataagtggaattataaaacaatgtagacatttgtgtctgacatattttacttggtaaaatatttcgaggtttgtctatgttatggtcaaataatattccactgaatggctgtatatcatactttagcttggagatttggtttctttctttattttggttattacatgtaatgttactatttgtaagtatatgcatatttgtttggttttaaagttgcatttgcttgcttgcttattcttttgtctgtgtgggcacttggatgtgagagatggttctctcctcatgctgtcaggagtagcaggtgaactcttaggtcatcctgaggcacctcacctgccatatgtgagatttttgtacatacacatatttttagttctattgaatctacagctggaatacagagtatgggttatgtagtaaacccatggttatcaagatacaagaccattaaaagtatggtaagaagtgagctggagtgatgtgctcccagaaccccagaggctgaggcaggagaatcatgatttcaaagtccacctttagaaaagtaaaaatttctaagaacatacaatgaccatcaaacacatatgcaaaaatgaagggagacaaacacccctcatattgacagacatattgacagacatattgacagacatattgacagacatattgacagacatattgacagacatattgacagacatattgacagacatattgacagacatattgacagacatattgacagacatggcttttgaagaagcagtaaggttgacacagtcttctttatatatttctgagttcttctttctttttacttttcttttctttctttctctctttctttctttctttctttctttttagataatcaagaatgaatgtatattgcttgggaattaggaaagaagtataacatgtataaataattattttcacgtaaatatccccatatggttctgacatgttctttatttgctaatgtgttggcagttgtgggctggattgctaagtgatagaaatcagctttagaatgaactagtttaagtcccaagaatgacaacaaagaacatattgaagcagagagtgcctgccagcaaatcctgatgtgggttattagctctcactgcttgagttaacatctgtaatggtggctttgcttgtcttcttcacccattacctacccccatcttacctacctttgcaaccccgtctggatatttctctattgatggggtgagtgttggattgtttaaacagctctctttcattctgtcccacttaagaacatcacttttccagtaacttatgcatttcatttattgtttttaaactggaatttccccaaatatctacttgccatttaaacttggactctttaattataatggaatttttgtattttgtccagaaaggatatttcactttccgtactctttctctctgctctatgctgccacactgcttttcagagcacttcagagaatggccacagtccttgtcctctattggtctctgtggaaactttttggtaaaggaggagagaatgacatattaacaaaactgtgagattaggtgccaccttacgggtccacatacagctttgacaatttagtaatttgtcatttaatttcttcatgtctgtgtctgtacaggagaagcaacagctctttactctacatttgtttaataattgaatcatttccttttctttttggaatttaagacacacaggatgggcttgaattcctgatcctcctccttctatccccccnnnnnnnnnnnnnnnnnnnnccccccccaccccccagtgccaggattccagctgtgagtcaggattccagctgtgagctgccttgctgactgatggttttcattttaagacactctgcttttcatggaattatggtaatgcacagtcccagaggccccacatctcttctgttcgttcctctgagcagtctcagttcagttacttctccctgaaaatgccctcaacagacagagcccagaggtgtccctcatcagacttctaggagattctaagtatagtcaagttgacagtggagattagccatcagacccttccatagtgactgaagtagacaagaaatgctgaccacacataatattactcagaatttctttttttaaattgatttatatgtaggtgtgtttgcctatatgtacgtctgtgtactacaagcatgcatggtaccaatggaggcctgagaagacatcagatcccctggaactgaagttacagatagtttgattcaccatatgtgagtgctgagaattgaactcaagtcttcttaaagaacagccagtattcttaaccactgagccatctctctaactcgtcagaatttccaatttttgcaacaaatttatgagatttgaacttgtattcctataggtaagcaaattgatttgcttaagatttagttagttttgatatagagagcattttgggatttcaagttttaatttgcagtgttcctaactggttctttttattctgtttctctcaaagaaacaaaaggaaccaaaggttcatggaaaggtaacaaaagtgaactgacttggaaagatggggaggagttttacactgaggttgaggacagaaattttaatcaaagggaatgcttagtgcttaagagagtatcaagatgaatcaccgttgtgtgtgtgcccctgtgggaaggaattttgtctgtgacatactgtagacctgagttgtctaaaatggagccatagtctaaaataactgtgactgcttaaatttaactttagattaatgtaaaaatttcatgttgtagttcattagctgtatcacacatgtgtagtagcttcagggctagtggctaccatttggacagtacacatatggagtatatcatcagtgtagtagtgttgattggagagcattgctgtagacagtaaacacagtcatgctaggaacactctagcaaatcaatatatagaattatttatagtgaaaaatggactttaaaatttcccaaattatagacattctaaaaatgggattggccattcaaagctgattctacttaaaaggtttactaggcttttgcttacaaatgtaagcttcagtggacttgacttgtattgggacacaaaatcagaagtctcaggggcttagggagtctgtgattataggttaaataattatctactgtcctttctcccttcccctatctagctctgaacattaatgttgagcagcaattatgtaataaggcaatgttagctagtatggatctatagtcataaagacctttatgtacttgtccttctgactattaaaacttcctacaaatctttacatcaccccccctccccccagactggcttcatttcctcatatcacatcgataagagaatagatagatggacttgtctgatgtttaatagtgaagggatagagccagtatgaagtcttagaatttctggtgctgcaaaccaaatattccttacatgatcttgacaataaggctgcatctcttttgggtaaaagtagtttgaaattcttatgattaagtttagaggagctctgactattaaatctggatacaaatcttcacatcccccccccccccactggcttcatttcctcatatcacatcaataagagcatggcatacctttcaggtggagggtagcaaaggccttagggaagtggttggggagcaaatgaccaattctcaaagtcattggaagtttccagcatcctctgggttcattgggtgggacaatgaaaggtatctgggaagactttgaaacagactttttgattttcttggatcatatagtatcatgtgggtcacatagtagcatgtgggtcacatagtatcacaggagaaaaatgcctgtgcttggactttgctaactcgccctagtgatttggcacaatttccacggttttacttttcttaaaatgttctgacttctactcaggattgactgtatcatcttctgggcctgtaacaatcaatgttacatctatattataattctcggtgtgaattcattatctttgtgggctttatctgctcgaggtattaagttgtaagtactttgaaaactgattgattttaatatttttttttagtgctttgcacaaattaattcttaagtcttttttgaaccaagatatctaaagccattctttcttatgctggtatttagtaatttatcaatacttttggtgtttgtatgtatgcggtacacgagtgtgcatgttatctctgtgtgtgatcacgtgtgtagatgtgtatgcacatgtgtgcttgtgtgtgtgtaggcctgaggttaacgtcagcatccttcaggattgctgcctacacaaatgatcgttctttgactgttgactgcttgcaggtgctctcagactcttccattgttgctggcccatttctgcttctctttcctactagctcgggtgtctgccattttttttaagtttagatttatgggctaggctttgtcagtgtgggagtatttcttatggtgggagacttcggatgcttatattcttgattaaatattgttagggcctttcccagcactgtgaaagtctctcctgtagaatgttttcttctggatagcttctgctatgagcacctaacctaaaatcagattggatttattggagaagtaaagtttggcatattgatagtatttaagtgtttgtggtgaaatttaggtttcatacaagggatggcccagcaagcacaacttatatgcatagtctctcagccaagtagtaacaaatgttccaaaagagttcattgtgagagtgatgagagttctctgtatgtcagttgctctaacattgcctatatttctcattttggacgacttcctggtacatcaaagtacagatgtataaaattgtaaaaaaaaaaaaaaaattaaaaaaaaaatcccagaagccctgaggtaataatacttttaattttctacatctttctaaaaatggaagaagtatgttggacagttgtgaattttaattaatggattgtttatgttctgttgattagtttagctaatcatctgattgctctccaggcagcttgtttttataaccatgccatgtctgccttacttaccaatcaccagttcctatctgctcatagtctgtgaagaggctgtgcttaaacctcagcttaggagttcttacttaaactttaattttacattcttgagcaaactgaataaaatttctttatacatatgagctcacttcctcactcctatccccgttccagcttctaagggccttctgatttataggctttcaaaaagtttttcccttccaatttaaatttaagtaattagtttcttcctaatttggaactttaatagaaaaacagttgtgtttggtttggcattagactgggcatctctgagtgaggtcatgggctcaggttttcagtgaccagaggagcagcctcctcgccacactgaggaaccagaaaacaactttgctgctagggccgagtctccttggcatttccttgactggagttgtgttccggctgcacccattccagtttgaataactgggtctccgatcgatcccatgcttgatgtggttaaggagtttatttatgtctaagagacagaggcgcaaactgttaaccgctgtaaatgctgtaagtttagttggttaagttgtatgtagacaaatttctagtgggaaaggcttccctaaaacttccagctcacttacacatgaaggtaagctggctctttcttcccattttccataatttcctgccaagaataataaacattttcttgcagagcatggacacaaaaagttagaaatagtcaatgttttatcaataacagtgggctgtcatgaagctcagtaaacaaacagatgtctgtgtacatgcttggagaagcagttggagccaacagagataatttcctttagacaatattctcgtgggtgtcacttccatggagatgtgtattggaatcaaatgatgaataacttggcctacgtttttatttatcaacaaaattcagggaactgtgtacttttagtgtataataataggctgaacagaaaggggcagcgggagagagagagagagagagattaatttggtatatagattcttctctatgaattatactaaaaatgagtctactgctttaaacttacaatattcagtatcaccctgttctggttgttaaataagttatgaactgggggtggaggggtggggcaacatgtttttgtagcatctatgaggtaaaagtagtagttaaaaatggtaggaacaaataaacaaaacccaggaagagtaagccaaaatgactccatagagcatgggtcgggcattgtgggtggcacacacctttagtcccagcacttcagaggcagagaggcagagagacagagaggcagatgcagaggcagaggcagagggaaccctgagtttgagaacagcctggtctacagagatagttccagggaaacagggctaacagggaaacccagtctttggggggaaacaactctcttcacaatagccacaaataatctaaaatatcttggggtaactaaccaaacaagtgaaagacctgtatgacaataacttcaagcctctcaagaaagaaatctaagaagatttcagaaaattgagagatctctcatgctcatggattgtcagaattaacatagtaaaaatggccaccctaccgaaggcaatctatagattctatgcaatccccatcaaaatcccaacaattcttcaaagacatggaaagagcaattctcaaattcatctggaaaggtaaaaaacccagaatagcgaaaacaattatttttttgtgtgtgggaggggtggggggggtggtttgagacagggtttctctgtgtagccctggctgtcctggaactcactctgtagaccaggctggcctcaaactcagaaatctgcctgcctctgcctcccgagtgctgggattaaaggcgagcaccaccatgcccagtgtgaaaacaattcttaacaataaaataacagctgggggaatcaccatccctggcctcaagctttactacagagcaatactgataaaaactgcttggtattggtacagagacagacatgttgatcaatggaatagaattgaagattcagaaataaaaccacacacttacaatcacttgatctttgacaaagatgccaaaaatatacaatggaaaaaagaaagcatcttcaatatatggtgctggtctaactggctgtcggtatgcataagaatgaaaatagacccatatttgtcaccttgtacaaagctcaagtccaagtggctcaaggacctcaacataaaaccagatacactgaatctaatagaagaaaaagtgggaaagaaccttgaactcattgacacagggggaaatttcctaaccagaactccagtggctcatgctctaaagatcaagaattgctaaatgggacctcataaactggaaagcttatgtaaggcaaaggacatagacaataagacaaatcggcaacctacagattgggaaaatatctccactagccccacatctgatagagggctaatatccaaaatatataaagaactcaagaagttaatcaccaaaaaccaaacaacccaatcaaaaaatggggtatagaactaaatcaagaattcacaactgaggaatcttgaatggctgagaagcacctaaagaaatgtttaaagtccttagtgatcagagaaatgcaaatcaaaacaacactgagattctacctcataccaatcagaatggctaagatcaaaacctcaggtgacaacacatgctggagaggatgtggagaaagaggaacactcctccattgttggtgggattgcaaactggtacaaccactctggaaatcaatctggaggttcctcagaaaattggaaatagatctacctgaagacccagctataccatttttggaaatatatccaaaagatgccccaccttgccacaggggcacgttttccattatgctcatagcagccttatttgtgatagccaaaagctggaaacaacctatatgtcccacgacagaagaatggatacaaaaaatgtggttcatttacacaatggaatactactcagctactaagaatgaggacatcctgagttttgcaggcaaatggatggaactagaaaatatcatcctgagtgaggtaacttagacccaaaagaacgtgcatggtatatattcactaataagtggataatagcgccccccccccaaaaaaagtacagaatacccaagatacagtccacagaactcaaaaaggtcaacaagctagcccacctccagcagaaagacaggaaatcaagtgagggatggagttgccatcccacagtcacaactctgacccatagttgtacctgtctgaaagaattacagggatggaaatggagaggagtctgaggaaaagcgacaggcccaaagtaggatccagctcaaggggaggcctcaaggcctgacactattactgaagttatgctcaccaaaaggggcctatcacgactgccccccgaaagacccaacaagcagctgaaaaagtcagatgcagatatttgcgcccaatcattggacagaagcagctcacccctgttgttgaataggtgaaggctaaaagaagctgagatggagaagggcgaccttgtaggaggaccagcagtctcaattaatctggacccctgagatttctcaaacactggaccacaaaacagacagcatacaccagctgatatgaggcccccaatgatgcacctaaccctcaagagactggagatcccagggaatttagaggtagggtggtgtggagacatccatgtggagatggggtgggtggggaggaggtgtgggatgtgaagtcagagggtggatggggaggggtggggaatggaaaatggagcgtaaaaaataaattaattaaaaaaatacaaattaaaaaaacattattttgtcaggaacaaaggttgcttttccccacacatcagtattggttgatggagaaatataatttgtttgaatgactgttggaatagttaaaggcatatctattttttttttttttttacattggttgggtctagtttggagatgtattcatgtctgagccagttgtttggaatcttgtcactcttctcttaactctgttctgttttaagcctgggctgaagtgactttcatccttttacatccgggacacatttaacttgtatcttcttgtctttgcacatggtatagttcagtgtacacagccaagaaaattgtgttcatgttatgctaaataaactcaagtgaattttctaaatatttaagtggtatattttttttctacttaaaaattaaagctattctataaaggctgtttttattagggttaaatggaagcaaattcatggaactaaaacatgctagctgagacacacccatgttactttagtttgctttattttgggtttctaaggtagcatgagccaggcaggaatgaggcacaggcatgtaatcccagcactcaggaggcaaagacaggagttcaaggcctatgtagtgaggctctatctcaaaactgaaacaacaacataaatcaaagtaaaggaaaatgagctccccacagtgactagattacataatccagaagcattcaattcacgcggcaatgaatttcttaagagcaagcatacgttctctgaatgctggaagctggagaggcaggcacttggtgagaagggtgagtgtgtggagcacgaacacactcccgagacaactggatggtgttgatcctaatgtaggggtgtaatatcctccaagttacacactcagtgcttgtgttatgcttcacttgtaagtacggataagaaacacagacttaaaaaattcaaacaaaggatgaatatttgtaaaagcattttctgccctttgctactgaactgtcactgctcatttgtttatttgcaagaatcaaaaattttaatcacgagacctccgtagacgctgcatttccttaagtgatggtgtgaaggttagtttttgtcaatttgatacaagcgagtcgcctgagaggcaggaaccttgaggaaatgctttcaacagactggcatgtgggcatgtctgtgtggcatttttttgattgttggtcgatgtgggggcagggtaggcaactgtggatgatgccatccttgggcaggtggtcctgggttatgtaagaaatcaagctatgcacgccaataagcagcgtttctccaaggtctctgctccatgcctgcctccattttttctgcattgggttcctgccttggcttccctcactgatggattgtggcatggtagtagtaagatcagatacacaccttcccccaagagctttagtcagtcttttatcacagcactagaaaccacctaggacaaatggtgtggccaaatggtaaagagcactggccccagagagccgggcagagccacagtctggctgtcttgctgtctccttaatcttagattccttgctgcttcactctctgattgagtttccttcttgataaaagtggcactcacctcatggcattattgttaaaaatggttcagtatatgaaaaaaacagcacattgtcagccccagatgcaagcttttgtttatcagtctgctttccagtcactcagtaaagacacacactgactgagcatcccctgtagcacatcgatgaatgagtatttagaagatgcaggaagtaatgggagaagcaagaggtctcttctaaccactacagtcttggtggaggcaatgcactatgacatgtgacagtgtatgcagaggatggagaactgtctccctcccccctcagctgttgggagtggaacccagagcctatacatgctggactagctccctactactgagctacatcccagcctcaagcaatttcacttgtgtgtgataccatttataatttaaaaaattatttactttttgtagacctttgaaattcttcagcatgatgtaccctctgttcattgcatccctgcattattttatggtctggcaattcttattttctaaattaagtcatcacttttttttctgtctttggcatttctgaatttctaacagctactccggtgtagttccagaatgttttgtgtcagactgatgaaaacacttagacatctactccctgctttttaaagtttattttattcatgttattatacattatcttaactattaatcgattcataattattaaataattaaccattaacaatctattaatattttaattaattaactaactaattaatgggaaccaacacatgccactgcacatggatggaggccagaggacaagctgcaggaatcagttttctttttgtaccacgtgggctctgttgattgagcacagcttgtcagatttggtggtgagtcctttcccactgagacatctcaccaccctactctgaaaaggtttgtaaaggtgtacattggtagaaaaatagtcatgtgaggtgaaataaactcactatgtgagtagtcagggcaaccttcctggggttagatggtgataagaaactcccctgagcagtattttccactttccagagtgtgaatgttccacgtggacacctcaggccagtggtatgctatccctgagcaagcagttgggaagaggcgtgcagaagaaaactgttatgtagtgttcccatcaaatagacgcaactggtacaaatgcccacctgcagaactaagagcaaagtgtagtagcacaagaaacaagtaatgagcttattatctttgatttaatagcatttataaaattgtgcattcatagtatttcatttttactggtgtctgtacttaacaattaacttagaaaaggtttgaaagcataacaattagtgatgatgagccccatacaactcactaccttcatctctgtgtgactctggctagcaattttagtactagcaattttactaaggaaattacctacatattgtgtaaagcacaaagatattccagatggtgttattaataacagccaagaaattggaaacaacccaattatttaaaatgaatggtggttaaatcagttcatcggaatgttccctataaatagaggtgactcctttgatgactttgtaacaacaggaaaattccacatgtttaaatgaaaattaaacaaacgtaaaaaaggaatgtcgaatatctgcatcttatagactggcaacacttaaaattcgtagatctgctaatagcagaagtaaatgctagtgtttgaagattgtaagagcatggcactgtcctctttattcttctcagattttccaataattagtgtttctcgtatgcaaatgagaaatatagtgtcacctttttctcataacaaaattgtaacatccctagatttctgctgcatttaaggatagtatcaaagtatatctcttattttacaaattaaatattttaatttaacattaaagagaatatatatacaaactgaattgactttttaatagataatatccaatttcttttgtcctcagattttatgtataaaccattgtagatttccatataggatttgaaatttttatagaaataatacttacattttaaaaaattcgtaagctgtaagtggttagctgtcactcaagaaaattgaaggtgtgtggttctaaaacagcctgggtcctgcagatcctacattcttgtctgatctatgtgtggttgaatttctatctgtcttacttcctgaaggaatttctcagatcttttcaaattatcttcaaatgtagataatctaatttcacacacttttagaaaacagtttaaactacgttctctgtcctttttagccagtaacgagtgggttaattttggcagacaggctaagccctgtgcagttttctcttccagattaagatgtgatgaaacaaattcccgcagcagcgcaccgtgcaggaggaaatgccatctcgatgacttcttaaagccactaatttaaacatcagagcaagcccctgtcagcttttcttcatcccaaagttgtaatatctcttctactttattgacttgctgtggacaggtttcaacagggatttggttttaaaagtaattcttagtgtttttatagagaagaaacaggagtgttccacgatctcctgaattctgagttccttctctcctgggaactcctgctacctgtttgtttgtttttttgttttaaagcatatactgttattaacttttgcattcaatttttgtttgtcttgatgatctctccctgaaacactgctgtctttttgagagatgtgtgtcagcgggactttgaactttatttactgatgtgcaaggttccaaagtttggcttatccagttaccagttgtgagatcctggataattatttgggttttagacatatctccgaaattaagataatttcccctagcttgctgaattactgagaggcctagagatataacatatactagtcctgacatagagtcagtgtctagagaagggcttctacctgattatcagcctttcggttttagttgagtgaataattgcttgtggggaaaggttttattcctgaatcatctttaaattatgtccccccactctctcatcacacacatcctctctttcttactcatgtacactcttatacacacacacacacacacacacacacacacacacacacacacacacacagggttttgatgagtgtagtttagtgagttggttgtcagattgtaaaggagccttgtaaggaaactgaaaaggagtgaggagagatgagacagaatttgagtgtggaatgacacacgcagtttggaatattgtaatggttggcacagcggatcctatggttaagtcaaattggaaaaaggttgaaaactggtcacctttgaatttggcaattttactgatttctatgatcactggtgtgtgtgtgtgtgtgtgtgtgtgtgtgtgtacacatgtctctgggtgcacttgtctgtggggaccagaagttgataacaggtatcatttttcatcactgtcgacattatgttttctgagacagtcagagcttggagatttggaaagacctagaccagctaactaggaagcccctgggatcctcctatccctgccttcctgtgctgggattacagatgtgcaccactgtgcccatcttttacagtgtttatggtgtgctgggtatctgaacccaggtgcttgtgtggcaagtacttgcgactcattcaactctctagcctcagtatttataatcttgttgataaagtagaggaatgtaacacatacttggaaagaaaatgatttatcatgcaatagcatcaactaagattaggagattatatataacaaagacaagacaacagtattattgcattgcttccttagccttagagtgctgcattgtacttcaagatgactgttagaactccatctgtagtatcagtattactcctggtaggaagagagggataagagtgtgcctcctgcctttcagaattttctttgaaattttacacagcactttttttttttttttgctaaaatctgtcacatgatcatacaacaatctgttgccatttaggggtctggattggttaatttttcctctggtagttaaagaattaaaaggtggtgggagaaatcttagacacagtagacagcagaagacagacagaatcagcttgtcaagaaaaacatttattagaggtgaggaaacacacacagcaagacacagagaaagaccttcttaaggcagaaggagactcaggaaagcctctccccgaggagtgggctttagggtctttgaaggtgcctcctccccccaactcagagttggcctgtttgaacaaaaacagagcctgacaggttcacacatttgagcaaaacatgtctgcctatcagggactctgtccatagctactaaggataattaggaaatactgtctttaggggattcttataactaggaagaaagggaaaactagacacttagcaatgataatgtatgtagcaataatctctcttttggtctaatagggttttgggctttttgtttgtttgtttgtttgtttgtttgttttttgttttggaattgatgtgtctttttttctattctaaaaacgaatacaaaagttgacaagcttgagatggcatgtaaactctctggtccaaatctaagcaagatgattgtaagcctcctcgtccttcttccctttctcagttttcaaactatcagtgtctaaaaaccatctgacattagaaacttactccaggaatacatttttatgataaaaactaatcaagaagtacagaggactaaaaaagtggggatataaaaccaaacttaaccgtcccttgttagcatttcttggcatgcatctgttaacatttaatatttatagtatgccattggtagtggggctggagagtcgtaacgatcgtaccgtcgtgtgactgtgttccctgtcactgacctgtacacttgagagtatttaaaataatctattttgtatatattgagctatagtaagaaacaagagtgggcatacagctttgtgacagaatgtttgcctagcgtgtgcagggccatctgtccagtcaccggcgccatagaagacaaaaccaaagcagaccatggattgtttacaaaaatgatatcgtattcagcatagtaccttgtactgtgcctttgtgttcaaaatgaaaagagaacacctttgcgtgtaaataaatacaattttgaagcatgatttggtgaccaagtatttactttaacctttggctgggctgcctttcttcagaggatgttgaacaaatgaggagtgttgttctggtccttttaacgtgggtttacagagagcttcgtgatgcgtggagaaggctgagcacacagccagatgtggcaacagaaacttgcttagctccctaaatggtgtctgcttgttcaaatgattctaaataaactactttgctcagctggggtcaatgtggcagtttccatccccagtttgtttgtttgtttttattttttgtataaaaggatttcttttctctctttctcaaattcatacttttcttggatttctccccaactatgttactgtggtgtcagaagagccagggtgaaggagaacatacatggtgtgccacagtttgagagttcctcggcacaagcatcatgttaattgaagcaggcatggctcctggcttggccttgggcaagccgctttcagaaccattctccctgatgtgaggtctggctgtcccctgagatagtttccctccagccactcttgagaggatgcttgctgttttctgttgtcttacttcctgctgtggttgccaggtcttcctaagtcttcgctgcctctcagatgaccacgtttttcctgtgctggaaatgttctgtttgggtaaactagcatgtactcctctcctggtcatctttaccagctgacctcaactctgcaactcctctcctctctcccctcttccttcctccctgtaccttcggagtcccctacaactcttgtaataccctctttaatcttcttttcaaaacctcatctttgagacctttttcttctctgacactttcctccatctgtcacacctcaatcccctctttgtcctgcatgatttgtctgaatatgtgggcactttcccctttctgaccacaacatctgtttttctaatatatatactaactactcaacctgaaggaaccttgtgattctaaggaagaagtttgctgctatccccactgccctactttatatcccacaggtcgtacctccaacttctctcttgtcaatggtaactcttttaccctactatcaggtacctgagcctactgagctcccagccgtagatgacatgggtattctgcagctgctcctgagctgctcagttcattgaagaaaactatagagtgagatttatggtactggcctacagtttcggaggtttagtccattatcatagcagtcagacgtggtgcaagagaaggagctaagagttctatatcttgatccaggaagagactgtcttcagcaggtagccaggaggacattctctcaccctggacagaagttaaacataggacttcaaagcccacccccacagtgacacacttcttccaaaaggtcacacctacttcaacaagtccatacctcctaatagtgccacttatgggccaagcatattcaaaccaccacattgggcaaggtatatgagatttctcagcctcagtttccttgtatgttagatgaagataataaaccttgtgccttggagttgttgtaaatgttaaaggggataagatagattctgagagatgtctgagaaattaagagtactggctgctctcccagaggactcagatttggttcccagcacccacatggtggtccaaagtcatctgtaactgtcataacaggagatgtgacaacagacatggaaatggcgtatagatacatgcattcaggcaaaacaaaatgatttttttttaaaatttaaaaagtgagaagacacttggaatgctaaattctgtggctggtttgttgaaaggccttttgctatgatcacattctttctcttgtgccctgccctattctttcatagaaagaaagtttgtcctgcttcatctgaggattcacctctctctcagaggacctgtcccagcttctctgagctctttacatcgtattcattttggaatctatgtctgtctggctttggaggcatcctaaaacctctccttaatcccattgcttcttgacccctccccttcttagcctattctgctttctgtgaccttctttctcagtggatccaagttaggagcccaggaggtaccctgtgttctttttcttttagcccctcacatgccattatcaagcaaccttccgataatgtgaactttaaatagtttctaaccttttctcagtctttttttagatacttctgttccagtccaagagcctgttacctccacaatattgtagcagtagcgtctaccatccacccctttgctagactgttccaatatatcatatagtgttctcaaaagcacaaaactgataatgtggattcccttcagaaataaccaaggaacttctttctcttctaagcagagcatcttgaccaggccctagtcatctttagctttgtctcgtcttcctgttgccctgtctgtgcctttgttccattgggttggagttcctttctcttcatttagtgtcagctccctataagctgactgtgtatgtggtctgttatcccatagctagccagtagtaccttctcatcacagcctatgtttgctatacattgtttcttgtctcctcccaagatcctggagagcaggagccacatctttttggttgtcagtgtatcacccattctccagcctggtggctggattatagtaggaccagttgttaaatgttgaatgcttcagttaggggaaacccatcttataaataattgcatatgttaatattcagagccacaaatagtattcttgcattttgctttggaaatttctttgaacgcaagtgtggggaaaataatgaggcttcttttcaacatacacccttatttcctttgctctaaaatcttttatgtttatttccattctgaattgcagacactgaagcctttttttctttttttcctatttggatgcttttgagagtaaaattccttttaacattaatgattctgtcagccatcggtcccgctactatagttagatgacattcacaagggtaattttgtgaggttttttttttttttcagttaagatattacatttgtattatgcagtctttagtttaatcctcaatgagaatgaaacccactaactgtcaggtgtgggaagccacatgtgccgttgctcagtggcactgactactgctggccaccacgcataagattggacaaacaaccaatgtgtacatatgcagtaaagttttttgcaaagacactgcctggcccaggcatgataatgaagttctgtaaggtactgagagtataaccaatcagatgtgagacatgcaaatgaggtatgataatgaggttctgtaaggtactgagagagagtagccaatcagatgaggaacatgcaaatgaggcttagtgcataaccaatccgggtgtgagacacgcccctcctaggcctataaaagcagcaccagttctgggctcgaagtcttttcgcctctacaatcaagctctcccaataaacgtgtgcagaaggatcctgttgcagcgtcgttcttcctggccagtcgagcgcgtgcaagagtcaggttctccaagaagctgagtagaaaacactgagaggctacatggctgcagcttgctctgactcagccacgttgctgcctctcctatgggactgtctcttcatggggactgttcagagggatggattagccatcctcttccttctactcacccctgacagctctgggatgacctggggaagtattcatgaagagtctgtcatcccgtagccaacccatactaccttatcttactatgcattcattgtggtggtgttttctgtgctgtccatttctcagggtcaattgcagtattaaaatatcaatgtaagttccagaaataaataatgaatagtttaattatttaattaataaataattaaaagatcaaaattttaaattcatatatatatatgtctgtgggagtatatggcacaggtatgcaggtgccaggagatgatgctggttccctggagctagaacagttgagagtgctgagaaccaaactcaggtcctctgggaaaccagcaagcccctttaactgctgggtggtctcttcagcccctgtaataagtttttaataacactttatagtattgctgccattgttccgtttacatgttgttaatctcttactgtgcctagtctataatttaaagattatgaggaggagggtgtgtaggaacacaggaagtgtgaagtttgttgctgtccttaagcggcatcttggaacgcgttctccatgcatagggatgggggataatgtgattcaactgagaagtactttcttaggcctgctgtggtagcacatcgatgatctttgtgagttcaaggccagcctgatctacttagtgagttccacgctagctagagttacacagcaagcccttgtctcagcaacaacaacaaacagcacaaaacaaacaaacaaaacaaagtattttctttatttttgaaagatagatgatggaacattgttattgtttgtgcttgattctgttgattctttaaaaaatactttatttttcagtctaaggtacaaaggagctcctctatcttagcttttaaggagttggcactttattttagaggagaatatgtacaattcttgctgtactttgaatttaatctgttagaaatggctgtggtctcaaaagcattggagggtaggacttgtcagcactctaattgaaccaaagattaaacaattttgctgtttaaattttttcagctactttttatgtatttacttatttttcatgagagggagagtcatcgagtgtggtttcacttgggatccatgactcttgccttgctctcttgagtctcccaggattatgcgcctgggttgtatcaccatgcctgattgttagttacctcaatacgcattgcttagctacaaaaatgctaagaaaagagattatataacccaatcaagatcaacatgaaaaagagataagtaatggagatagtgaatatgagtcatgtgtggttttaggataaagatagaattttagcttccaccttaaagtccctagaagaagctccttaatcacagtcattcagggggaagggacacaccactccatctcctcatattcttctcctcacaccccaagagcacgggaatcttaaagaccaagaagacattgaaacaaatcccacaaaaacacctctacatttttggccagctacacaagacctgtataattcaagccagacaggattccagcaccaagagggcaagtggacaggacatcccacctctagctgagccgctaacagcagttgataccttctgggaagggaaaatcagttttctccaatggtgcatcaccaggtatatcgactgcactccagggcatggcccatgcctaggagtagctggatgccagttttataatgccaatcaaaagaagtgcttctgttacacattcaaatactcacagaatgctattaataaagatttttttctcaaaaggaacctaccaaaatgctgctcttgaatgagataagaaaataaaaaactacctgagtactaatatgcaagaagaggacttccttataattactttacaatgttaatattcctggggaggatcctagctgccatttttaatcccatctctatgagaaaaatatatccacagctccccagggagcagcgagcaatcaacacagttttcccatctctccatttcctgtcagtgcacctcccttgtcatgaagtagcttattaagtaagtgtctggcatttaagacatgtggagtattgtaacctaaacttaagggaacacaagagctaagctgttgccatcattataccttcatagttaaaaatggaaattatatgtattacagacctgagagtctttagagagaagatccaacggaaaacactgtgcaccagcccttaataacttaaatgcaaatactggcctctgtccagaaactaagtttcaattaagtgtaattgttccatcgtacaaagtcttgttcccaccaagaattcttggcagaagtagtgatgacttctcaggaaagaggcaggagggggctgcagagggccctgatggatccttaagagtaactttctagctcttctaaagtaaggagtggggtctgggaatcacacaccctgattttcctctggttttctaatcacggagtctagtttctttgcttgtctcctacttgttcagaagttgtgatttgtagcgaggacttaagtggatgttatagaaagtggaaatgagataagatctagatggctgtttgtgggtttagtttcaaagaccatatttatctagaaaataagcaagtagagtcagcaggcattttccgtgagcagtatctgttcctggcatttcactttggccaccattggtgtccccacaatctctcaaagctcccctgctttgtgtcagaatgccccaccaagagatcaaagctttgctgtgtgttacttagtgtagcctcgcattgttctgctaccacgtggctctagttttaaagccaagtgtagacagttaaatcttctcacttggagcatatacaaatgtggcaacaaggggcagaaatagactgggtagagagactcatcctgggccttaggcttcgggagcggcagacaggccttcctgtaaacgggcccttggctcatagggtgtgtgggagcctgtgcctctgcctagctgcagtttactattctttgcctgttgctgtagaggaccgagggagacagcagaaggcctcattccagctgcactgagctgagcttctggggggagagggttggaggagtgttggaggggctcttcttcggagttaatctctgactttatgcttggtttggtatgttttcctcaggtcactgctgaggaaagtttggagaagtttgatttttttttttttttcattcagatttcatgtgtggaagccaaacttttgaaataatatatattccaaaactaggccacaatgaaatgtaaattttaagacttcaatgaaaaaaattacttttgagaattacttccatgaacactatatctacatgactccttcctccccatccctcattctctagaattctacattttaaagagaatttacatccatcttcccatctggcagcacattcttaaaataggaattttatttcaaaaatagattcaattttaagttaattcattaacctacattgctatagattaaactttataaaaatgctagccagtttcccttgtagcatattttgttataaaatagttttcaaagtagtctattttaaaattttagtttatttatttatttttacttttttttttttgaagtaatggtttcagtgttcataatacttacttggtacggcttttcttttttaatgatgttttctcaaattaaccctgtgctaaactcgtgctataatcaaaaaggaacaatggaacctatggctgcctcctttccctgtatcccagggaggctccacgccctatgggtgccttgagtattgtaactgaacattgtaagagtttctgccaactcttccatgcagctctggcaccttgagtttgtgactgcctctcgctgtgtttctctctcttatgttcctcctcatgtttgttttgcagtgtaatagacttgacagctgtaaacctttccatatgttccatcttgtagagataaactttttcctcagctttgaagacttacttctgaagtaaacaaccccaacagactttataggaggttttgtaaagtcgtcacataagcatgccctccatgaagcgaaggtggttgactttctgcccctgtaatataaactaggtgattgaacttttccagggcacgaggagcgtcttaataggtttttgtttttcaaaggtttgccagagcagtgcagactcatgtttgaaagtctttaaaagtactagttaacatcataaatgactattttatgcaatataaattctttaattcactgagtgatttactttggctgaaaggattagtaaaatagctttgggtttgcttgcaatctcctcttttatcttttacaaattaaaaagttggtattggtatatgatgacatcaaaagcacattttggaaattgtcttggagaaaaactctttatgatatgttttaagtaactacttctttaatttttgttctcttagcaaatcaaaactttctggtacattttatttgttaaaaacaatgtaaatatgtttattcttagcttgatgtcctcactccctgaccagtatgttttgatccacattactcttctcccagatgtgggtatgggtgcttttattatttgatttcctgaaagcctgaaggtagacatgttttgtaagttttctagaaaactataaattcaggtacataagatgttaattataatacatatagattcatctttgttattatcatcatctccttagcacacagaatttaatcaagagactttttgattttaagaagtcaaaattggcatctaaatctggtatgtgtgatgtggttcatggccaatgggtgtctaagccaggttgttctggtctctgaaagctaatgatttaacttatagaatttgtgtgagctgcttatcattagatattaaaatataaaaatctaccgctaaatacattattccaaatatctatatgatattctaaatagtgctctataatcaatattttgtaactatcttcctacatcttatttagacttgttcatttgaagtcatttttgtctattgtgggtatcaattactggaaatactacataatggtatttataactctgcttttctacacagcttcatgttcaaggacatgttttcattttaataaaccttggcagaagtaattatattgtggaaatcagtgtgctgaaatcaggatctattattttgttctttagtcttcagagtaatggtggaaatgttaatgtatattaaacaaacaaatgtcatatttatattctaattatcttatgaatatcacaaaaatgagaatatagtttctccatgattaaaagctactttctagccatgaacaacgtgggccatcctaaaagcgatggaatgaatggagttttggcacacatttgttctcattttcttttaagtcatcagcaagaacaagtcttcagctacacataaaagagatacattaagggtgtgtttcgggcagcttagattattaccgttattattttgtatgcttgggtattgaatacaagaccgtgtacagaaggcaggtggtatcctacctctgagcaaaccctgccctcttgaaaggtttgatagtacacaggtcatcctcagctgcccttgctctgtttccctcctgttctctggcacccagtgcctgctttcattttgctatgcatccttctgccttttgctttctccgcttctctcataattgcatgttttacataatcagcaggcttggaaggccctgtaaatgctgtcttctggaaatggtcagaggttgaggaattcgatggttagaaccactaatggggatcttctggaagcagtcattgtgttgggcattagaaggctgagggtctgtgatggatgctgctggttaccgtttctacaggattctggtgcttcatcaggattctatctgtgtattgtctttgtgttctcctcattgttttcttttgaatcctgtatacccagggtttgtaggcactgtactaggtttgtaccatcagagtccctcttttttgctatgtatttgtttgttctagctcaggaatgattaggtatttgagaatagaaatcaggcctattcctgagaccagggcttggtttcttggacattggtggccagaattgtaatatttatagtagatagtagtcatatatgttgtatttcatgctttaaagtttgaatggaattaaaggggagttaactcttttgaattaaagaaagcactgaaagaaaaactgtattcatcgtcagaacagtggagtaaaaaccccttattattcattacattttgtaaagcaagaaacaaagaagtctagttgtttcttaccacagtcattttcgagaggtttgtttattagccaactccgacacacccctctcctaagcccagacttctttttaatggtcttcaatttcgcaatcatttagaagtgagttttttctctttccaccacattttttagtacacaccctcttccctcttctccgctttacttttgtttccttgagaaaggagagcccccttgagagcatagaataaacatttctttgtgaagtgtgacttatttatgcttcagggcttgtcaatgtatacacaatagagaaggtgatggaggcttccaggcatgccaagccagcgttttgtgcatgttggggccaaagcgttctttaagaaggctgaaaacatttttaacaagtcagaacatttttacaatttccatatttatcaaacatgtcagggaatggaattgtaaggccttccagggattaactgactctagggcttgaatggttttgttaagatggaggaagccaccttctcagcaccagtgatttgctccaataaccacaagagtgagactgtgggtgagccctgcaggaggagaggtaatcctgaggcgaaaatgctctttgaatgggggcaaaaaaatcttccaacagtgtggctcttccaacagtgtgactgactcttccaacagtgtgactgactcttccaacagtgtgactgactcttccaacagtgtggctcttccaacagtgtggctcttctgagggagcccagcagatggaagtcgctgccccagagcttctgctttatcagttctctggttggtggttcttggtctttgacagacacacgagtgaaaaggaaccaagagacatagccgttcccaaacaggtagccattgcttttttgtacttggcaaaacatgccaaaactcacattgttttcagatgtctggggttcgacagactctcgcttgcatttacaaacactctcctttgaatttcagctcaggaatatattgggtggcattaagttggtgatgcatttgcatgataccagaaggctgccttcggaaggtgattacatcacacacgtgtccggagctgtccttgctctgtttccctccggttctctgacactcagcgtctgctttcatttcgctgtgcattctcctgctttttgttttctctgcttctctcataattgtacgtttttcataatcagcaggcttggaaggcccttacatatagttgttgatgccccctcattctaatatggagagattcgggcctcacgttctttctgtaagatttgggagttatctagttatggagtgatccccaaacccatcatgggagcagcacaaaggcaggccagaccctttggtctctgagctgcatgattaatatgcaaccctgggccaatagttagttttaaagttcgtgttcaaatgggttttcaacagctaaatctagagcaagcttcttctagagaaataaataagaagagagagagagtgtgtgtgtgtgtgtaaacataagggtttgtgacatgagaagctcggagatgacggagccccaacaatgctccgaggttaagtgtcacaggtgactcccattacagttggtaggaaagggagaagcacgtgcgacttcatgaatgaggattaaaccataagcttttaaaggataggggaaaaaagctgtggtgaaatatggcgcctaacttgttactgcctctcagattgcaagggagcatgcgaagggctggttattttgttgttgttgttgttgttgttgtttttccccacctgcagattccttcatttgtaatccggggggaagcaatgccagcagcctccagcaaacagttcagcttgtgcctccagcaggggaagaattttgagcaaattgatgggattattttgaaactaaccagccagaagtattgggcaatcgtagccctgaattgttcagttccagagagggtggtacagtctgttcacgtcactccatgaacctatctgggtccccatgagaattttcttctttatgtcagtcaatgtgttcttcagactgcttgaaatgccccaaagacagagtctgattcaagtccttcatcttatctctgatttagctggtcagaacagaggtgattgacagtcatgctggcttaggtctgtttttacattcacatgtatttgattttggcatacaaaaaaaaaaaaaatccatggttttctttttaaacttttgtcctggttagattaaaacagataagtcagtaaataatgataacctacctctcttctttctttccctaacctatgtctgtctttcttcctttctttcttcctttctttcttccttcctttctttctttctttctttctttctttctttctttctttctttctttctttctctttttcttatcagttattataacttaattagggcatattgatcactagtggggacactgttgcaatttatgtgttcagttgtcatctattgcagtgggtgcggcttggtgaagttgaaaggcgagggtggatcaatgagtcaaattttaaaacgctgaatgggttgttaggctgtgaagcagccctaaagcttgggctcccgctcgctgttgggaagctcagcgacattttaagcacagcttttgtcctgagcttcacctctgccacagcgccttttccataggcgggcttgattaattcatttctgcttttgcttcagttaattctccagtgttctgtatctttaatatacaatccagtattgaatactactttatgccaaagaccattacctttgtaggaagctaaaactaaagaagactggggaagtcaggaacgttacatgtagtttttcatattgacttgtgcattctgaagcggtctgctcacctgccttttaaattacagtcaagaagtagagccttctcatgagtaaatatttgaaaatacatcagtaatgtatttattgctcctctacagtaaatactaatgacatggggacaggccttgtgttacatggacttggagaaacaagaggaagacagacaaactgtcagggtgacaatatattttattcataacacttagaaaaatgatgagtttcagaaatatataaatgggttctttctttcttgaagtccggaagcgggctttcctgttttctttccttggtgatgccccagggggtgcctcaactagccctaaaggtgccctgtgggaatttcagctcacacatctcagcatgaggaaagattctggggaaacgctggtttatcatgttgctctttagagcattgctccaaaaaacgtttaaaaccatctgtacactttctgtggttttcagtataaaaatggtactattgatacttgtcagtgaatcagacctggatacattctgtggttttcagttttaaaatgagcctaagtattgcaacttcccagtgagcagggtgacatgacaccaaggcactgcttaagcacagcatttatactaagtgcattgcaactttttgacgaaaaggattcaaggattaatagtgttatcgtatctctttcatttcctttttcctatttctttttgtctctgtttctctgtgtctctttctgtccatctgtctgtctctttgtctctctctgcctctgtctctgtctctgtctctctctctctgtatgtgtgtgtgtaagtaaatttttctacttacccacagtattaaaagacatttcacatctcatactcagcacaggagattattaaaacatctagctacataaatgaaggctgtatttagaagtaaacctaaagtctacttgtgtctgtgtgtgcagtatacatgatcattctctaagacactaaagagtagcaattgggcaacttttgcagaagtagaaggaccaagtattagagaaggaaaataagattccccggaagagctatagtctcgtccttgagggagccacggcttcaaagagagaaagttctgtcagtctatacttgccagggcaggaaatgcccccactggctcctcttatgtgtaaagtcttgaaaaaaaatcagttatgcaaatagtgattattaaagaaagtcatttgcatggtgggaaacttgaaaagaataaggaaaaacaaagaacaactacctgttcccaaggtgagtgctgactcccatggcacttcattccctctgttctctctatttttgctacttgaatatgcacatgtaaatatgtaactacaatttacgaggtcaataagtgctcttttctttctaatttgtgttattgatcaaattttcagacttaggggctctgtgcatatatagaaaaataggaatttttactatgtttaaaaggtgattatgataaacacatactcaggaaaggggctcctgggacctaggaaagcatgaagaagtttaggctcacaacagcagagtgtggggtggtggcacggacagaggtgagcctgtgttgcccacatcctggaacccaaagtggtggcttttttgtcctctacactgtgctgtgaggctgtcaggatacagctctggttagagtttagctgttagttgccctagcactgctctacagagcaccagaaggactgtggtctgacttggtgcggcttccctaggaacaggctgatggttgatttggagcccactggaagccaacatttcaaaccaacaaacacctcactcaaaccctgatatggcactagggtggctatgctcatgtgaagatggcacagctgctactgctcatccacggggacataggacacatactcaactcccattggcctgatccacataggtcttggagtctattgataccacctctgactccactggttaaacctctacccgaatgtgtttacttacagtaaaaaccagggtctgtgccggactggctgtttcactgatgggctttcaccaaggtacctagatgggcaaggcctctctgcatccttggcgactctctcaggcagggacctggaagagccattcttctcttggtgtatttatttctaatgtttaaaataaaatgttgtttcatttgttcattcattcatcattcattcattctgtgtgtgtgtgtgtgtgtgtgtgtgtgtgtgcgcgcgcgcgctcgcgtgcatgcgtgtgtttgtatgtgtagcttgtgtatgtaggttaaaggactacttgcagagttggtactttattctgctatatggtttcgggtgattgaggtcatctggccacaaggacctttccccattgaactatcttgaaggccctctttctaatatttatccatgtaaatacaatgcagttgaaataatgctaaatgaactttcttttcctgctaagtttttctagcatttttggatctcagttcaagtaattggagtgttccattaagtatcttacaaatatcatctcctgtcagggtgagacgggcattacaaagtcctgagcttgtgtttcactctgtaagggagtcttaagtgccagagagaaagctagacatttttacgagtttttgaggtttaatattaaagggggaaaagaaaagaaccagccgggcggtggtggtgcatgcctttaatcccagcactcgggaggcagaggcaggcggatttctgagttcgaggctagcctggtctacaaagtgagttccaggacagccagggctacacagagaaaccctgtctcaaaaacactaaaaaaaaaaagaaaagaaccatcctcctgaggaatggaatattttcaactgaaccattatgtaaaaccattatgtaaaaaatgtgtttagcatgtcagcacattttaatcagtgtaaaggctgctttgaaagtgatagggaaatatttgtctagcgttcagccctccagtgcctagatacaagcatacaagggaggaagtgagtgttataatatttagatagtaacgctaatcacagcattcattaggtatttaatagaggcttgagttagacctacctagaacttataagacagaagtcggtttggattcagtcacctggacacgtgctagctgttagactttgagctggccttatgggagtgcgagagacaccagggtggatagaggtttcactggtccagctgaggtctccagaccctctgccttcacatggcgctatggcacgcacatgtatacatttgcgtcatggccacacagtaataacgcatgtaattttataaagtgataatcgggttagtgtttagtctctgcttgccttctgctgcttccagcatggttttgttatttgaagtgaaaacttgactcattcggttccatttagatttcaattttacactttaactcccatcttctgataatcgtatgtgggggcgcatgtgtgtaaaacatcaaagtgtctgtgcaaagaaatgtacccagagaagggccagctcccttctttgctgtttcatccctgtaacttcagtttcgcttttacccttcctgtgcttgtttctcctcatggtgtctagatttatgtgagcatatccttgatttttgtcttcgtctttacacagagtgttagtctgagattttacttgataatgtatctttaaattatttcctataaatccatgggaggtttcttttttccaattcttctttataaaataatagtgctccactgtgcaggacaccatggaaaggtgacactcccacaccgagcaccaatcttgagcttatccccacccccaaatacattacaagaaattaggagaattggtcgggtctcagtgagaacagtaaattattaaaattcctctaaactcaacaagttaggaaagaacagatgttcctgtcaagtgagaagagctgttctgcatatggaggcaccggcttaagtgatctgtaatatcgtcttcatacttaatgttaaaaacacaattggtgattcagatctgtaaccccagcttggagaggctgagataggagcaccacaagttcagagctttcctgggctactctgagttcaagactccttagtacagtcttgtctcaacataaaaataagttggggaagggagggttggggggttgcagctgagatgtagcttggtggtagagccctaggttcaatcccagtttaaaaaaacaaaacaaaacaaaacaaaacaaaatcaaactcttgtcaaatatccagtacagtaaatatgaatacataaacattttatcctcttttaaggacaattttgcctttaaggttaaagaatttttcccaaaatgtaaatagtaaacaatttaaactaatgctatttatctgcagatcagcaagaattatcaggtttctccaacactcattcttttgtaaataaacaagtaaatactctctcatccccagaatcatttaatcaagagaagacatgtaatacagccaaaaatcagtaagctacactagatataggaatctttaaaaatgaaggatttgatttttggccctcgtttgagtgatctcacatgttaaataaacaggatgtcagtactcaggagccttaacgtttctggtcaggtgtttctggggttgtgtctttgctgagttgtgaggtgaagtattgtggtcatccacgacttaaaaaccctgcagatagagggtcatggcgtcatgttgttgctcaatgctggcactggctctgaagtctcgaaacgccgagagatcttggaagctacacaccatcactctgaccagaccctggtgatcctgtagatcagctttgacttgtgtggaagaggactgcatatgagctggagactaccttcaatgacttacaaaagtgcctttaaaatattacccaagtggcttccagggttgtcgtttctttcaattaacaaagccttttcttattttcctttcagctcagtactaaatcccagtgtttgctgaggaaatattgattaatttgagtggggcaggctcaaaaccacgaacactgaatggccctagatctgggtgggaactgtttaaacttattttacagcacaagagataagatgactctttaaaagacagcagaggaagaaagaggagggctttcaagagaagatgtaagccatcattggtgacctttgactcttccaacataatcagcagacctgcctttctgagttctagagtgtgtttatggaaacttcagtaaacatgctttcaatgccattcgctgacgtttaaacatacgcttgcagctttaatgaagtttaaagttgtgtataacttcctgaaaagttttacaaattagtttggatataggagatgggacttgaaatcaaaatcatgctataaaagttgggcagccttaaatttttcatccaacacataaaacatgtcaaacacgtttaaaaccacttgagaaggaagtctgaatatactgtccgtgtaatctcgagggcctttcagagtctctcagatgtgctctgcgttcttttctcattgagtagagtcactggtggttgctgtattcattgttctaaaatcagtaaatgatgcaaagaaaacccactatcttttcaacttaaaaatagtatttccttttagatttttgtcaaccaaatcactttcagttttctttttctttcttcccccaccccgctttgagacagagtcttgtctctcgtgtagctcagcagacctcagacttgtaaccctcctaacctacacctcaggggctgggattctactcaccgtccctggctctcatagggaaacgtgtgtatgaaaaccagtgggactaaacaagaggtgtatgtgtcttttaagacattgctgtgtagcccacactaatcttaaacttgtaatcctcctgcctcggcctcctgaatactgagatttagaggcatgaactattatgtttgggtttcagcaaaaactttatgcctatgttgttatgtggccttcagttttactcacagtatgctgaagggagggtgtttgcctctcagtgagatcattggagcaggtcaggatttttttttttaaacttaagtgtgataaaaagtacatgacttgtattgatctgttttcttttataataacagaatatcagaggcttggtactaagtttaaaaaaaaaacgaagtttacttagctaacagttttgagattggcagctgagatcagatggcctgctgatttgactctggtgagcatgtctctggctgtgtcaaggtgtgactagttgccttaatggcgggaattgtgtaaaagagagagctcgtgtgacgacaggaatttggaaagcatggaagggccaagaatgctgctttataacactttcccaagagaactcatcaaggtttcatgattttgttttgttttgtttttaatttggagtgctgggatggaacattacaattcaggcctcaggctgcagtccactgacctctgaagaatgtgtgtctcataaccatccccgtggtcaattataaaacatctccatcttgtcagagaatgtccttgtgcctctgtgatgcagtccccaccctgtccccagacaacaataggatccttcttgatcacaggaggatagttttgtaagttttagaatcccaagtgaatggactcaatggtatatatccttttgtgtctggcttctgctctgttcggggataatttgtggcatgtctgagttgtttgttcatctttttaaaaagatccctgcatagtacactctgtacaaacaggctgtcatttattgccttatgtactaacagacattctgctcatctttattttggaattacagataaagggttcttaatttgtgagtgtctttcataaatgcaagctttaattgcttcagtgaatacttggaagtatgttgctgggtctatggtgaattatagtcaatttaccagcaagtgatgagctgttggcagtggtcactctgttgctgactaatgctgtgcgccctgttgccattcttttatctttttttaattctagtgtgtgcaaagcaacatctcattgagttttaacatgtgttttattattgactgataacattgaaacaacctttttctgtatgtaagaccttttaggctttttggtgtgaagttccaaagctttggctggcttgggttatcatatttgaaatcatccctagatatcactcatgatgccttcttttatccagtgtaccttcagtttcttcatggcatttgttgaagagcaccaggcttcaaatttgttgaagtctgatttattagtgcgtatggttatggggccttaatgtcgtgaaattcatttttcatcaagagttacagtaaactgaaagtgtgtgtgtgtgtggtgaaagtgtgtgtgggggtaatgtgtgttgggggataagtagtcagaaaatagttcctattaatgccttgtgtctgactttattggaatgaagtctttttacttattttgaaatgttaatattattaaagagaactcctctcttcctttttttctgttcagttctttctgtttttttcttttccagtttaccttctactcttccaggaacactctcctctgtttacattgttagtccatgtggtgcggcatttgcctcagttttggtttgatggagaagcctttgctattccctcaaacttcgtcagccttgacccccttgatacttgtcggctttgagaacatgtgctttattttaaagctttttcctttagtttaatgtccgtggatttttttattgtatacatgttggtgcgccatgtgtgagcagtgcccctggaggtcaaaagagagtgttagatcctctcgggctgaacgtacagttgattgtgagccaccatgtaagtattgaatttctgttgaaaattctgcttataacacctatatcagtaggaaaaaaactagaaaatactccagtcagtcagatacagttgttaatagagaatttcctaagtcaaagagcaatagtgaaatttaatagaaatatgctaatctgtaatacatttatatccaaagtcattatttttcagatttaaaaggcacattcaaaatttgcattttaaacgttgttttgtttaacaacaatgcctgatgctgtgtgtctgggtggaaacaggaagtggcagggtcggttaagtataactcagtattatgacatcagaagcttagagtggacagtgggcttgtttgacttctttttttgtttgtttgtttttgttttttgttttgtttttcaaggcagggtttctctgtatagccctggctgtcctggaactcactttgtagaccaggctggccttgaactcagaaatcctcctgcttctgcctcctgagtactgagattaaaggcatgtgccaccttgtttgacttcttaattctactatcagaaaatatatcttagagatgacatatgtatatttatatgcaaatataatttattgcataatagttatcccatacttaatatactcatatatatacatttgtgtatatatgtgtgtgtgtgtgtgtatatatatataaaaccaaacaagcaattagaactggctttttcaattcaaaaggtagtgatcctgagccacgttgtaaggaggttgccaaagggactcctgaggaggaaggagctgaaatgagaaactcaaggactgttcttatgtccagtattgcattctggatgtattgaaatgtctcagaagagaacaacctgctttttagtttattttataaataagtgctattgtttttattattgttgttattgcttttgagttagggtctcagctatatagccagctgatctggaacttgctctatagaccaggcttacctcaaacctcgagtgatcctctggcctcagcctctcaagtgctgggattacaggggtacaccaccatgcctggcattatagggtataccaccatgcctggcattatagggctataccaccatgcctggcattatagggctataccaccatgcctggcattatagggctataccaccatgcctggcattatagggtataccaccaggcctgacatttccttttactcctatcattttctacctcaaaataaaatttgcttagggcttctcagaaatcaaggaataattaaaagaaaggtctcctttctgccccaagggacttaagcattggttctcaaccttcctcatgcagcgacccttagatacagttctcatgttatggagaccctaaccataaaagtctttcattgctacttcataactgtaactttgctactgttatgaattgtaacataaatacctgatatggagagtatctgatatgtggcccctgtgaaagaattgtttgacaattcctaaaggtgtcatgcatgacccgcaggttgagaaccactagctaaaataccctgagaaactgcaagacattctgcttcagtgtctgccagtgacagttcagcttacacccgcctaagtgccttggagttgaaactctcaggtgtgatgcttcggttttctaagtttgagccatgagtctgtcttttagttagctatggtcaaagtgtggggccatatcatagcaatagggtgcaaacgagggtaggggttggcttttttctgagtgttggttagcaagaggagaaatggaataagttatgcgctagacctcaaaagatagttaatatgtttcccaaatcccagtggtggggcagggccagcattggcttgtctgtctctgttttagatcaccaatgtgtcttcctgtgactataccatacaaggtgccgttctggatgatgagcagaaagcaggggatgccacgtgcttccggctctgcattttcctacaatccctttggtgaaaagagtatttattttccagtctcatccaggttaagcttacatataggaagggcagcctactgatttatataagatgccattaaacttttggaaaagttccaaattcagtactaaacaccttttgcctttttaaaactgtcattttcaattaaaaatacatgtaatatttgtatagatcattctgaaaagataatcataagcttaagattaaacaaaaattccaatacctacctatttattattattattattattattatttattattattttgagaccaactcttacccatgcacctcaatcttgctttgtagcttaggctggccttgaactcatggcagtcctcatgtctcagcctcccgcatgctgctgcatgcaccgatcactgaggcacaccactgcaaccagctccaattttctcttttgaaacaaagaggcgtttgaattatatgctttcttaataacttctgtgttgctgttacagaatacctgtaggaaacaacttatgggaggaaaggtttattattttggtttatagtttcagaaggtttaagaccaccatggcaggggaggtgtggcgatgcagatccgccaggggtggtagaatgtgtgacagaagctgttcacatggctgtggaccaggaagcagagaaaggttgaaaccaggtcaggccataaacttcaaaggcttgctcctcccacatacgtctgttagccagttcctatcagtgaaagactccacatccttccagaataccaccaccagatggggactaagcattcagaatatgaattcagggcctgcagagatggttggtggttaagagcatgcactgctcttgcagaagacctagagttagggtcccagcaactgtgttcggcaactcagagccacctgtatccactgctctagaaaatctgatgcaccccctcccccactcaaacaaacatgaacctataggagacatttcaggtttaagccatatatcttgtgttgcttgaaatatatcccatcaaaacatgtgcttgctcttattcatgaataatataaaagttaataaacattgtaaatatccatgaactacccatagcccaagtatgtcataaaggatgtgaagatatagtatgtagtgttatgattatgtaacctaatttattttaggatgtattcattctaattgaataagtgagaatttcttatttctacattcaagatctattctgatttaaagactatcatttctgaagttcactttcagttttaatgctttgtgtcaacgaatcatttatcagcagaaggtgatcaggtaaaaataggatagtatcttacactttagctctttcatctttcttttaccttctcagatagggttgaagaaagttgtctccttacaatgccatgttagaaccctttagagataattagtagttgacttagggaattgctgagatggttcccaggagactggatttagctgcgatgcaggacatacttggtcttgagttgaacaggtcgttggctctatcaaggctagggatttaactatagcttggtatatttaaaatcccatatttgtttgagattgttattaatctttaatatcactaaggagttatgtaatcttgtttttgctttagcaattttcccggtgttagaaaatagtcagttttggtagtgagagttctccgagcctgttctttgaaaacaatcattttattttttagagtctaatgtttagttacatagtttcccactgtttatatagtactaactttccactatgctgatagaatttttaggaaaggtcgattcaggcatgtttaattgaaacatctctaggtaaattatagtccaggtactttttttttttaatcccatgtaatcttggcaagtcattattaaattgtattaaaactttgctttgaaatgaatgttttgtttggtttgcataatgctccctcatttaaacaaatgtctaccagtcctactgagcttttgagttcttcatgaggacagttaacattttctgtttccttcccacagtgatggggttcagtgccacttcagcacagcagatggtgtcccagtcatacactgggacgcttgagaaagcagaaccctgtccagtggttttacctccattattgattgaaagatgtaatattgttagatgtataagtaaaaatttaggagtgcctaatctatattttaaatgaaatattaatattttctttattattatcaccatgtccagtattatttattcaaagtacaatgagagcataaaaggcaaaagttttttttaaagctagagagatggctcagttgtttaaagtacttgttcttggggaggactccggttcagttcctagtgcccacagggtgactcacaagtgcctgagctccagttccaggagatccaacactttcttctggcctccatggaccaggcactcacatagtgcatagacacacatgtacagataacatttttaaaaaatccataacattttaaaattttatttgtttatgtcatactaattttttgcctacatgtatgccatcagaggcatgtctctatacttgcacagtgccatcagagggtgtcagatcccctaggattcaagttacagatggttgtgaactacctcgtgggttccaggaactgaacctgggtcctctgtaacagcagccagtgctcttaacctcatctccctagcctaataaaaatttatatatttttagatttatttattattttatttatatgtgtacactgtagctgtctgcagacacaccagaagagggcattggatctcataacagatggttgtgagccaccaagtggttgctgggaattaaacttaggacctctggaaaagcagtcagtgctcttaactgctgaggcatctcaacagtcatgtcgtctattttgatactgattttattccttcccctctacttccatagagatttacgattacacgtatcattgtttgcattcacttctgtgcactttctcctaacacacaaacctcctggaagtcaatgattatgctttttccttttttgcctatatcctttatccttggccaaaattctgttttgtatgcataaaagtcataattatttataaccgggtagtcactaggaaggccacacatttttggagcaacaggtagtaacagataatggaatgcctctggggagcaggcggggacagttgaatagcagtaagtgatgtgtccttatggtcttcagtcagtccttccctggaaaaccaggaaccccgccccactatgaggcccttttgtccactcagatctgactttctcatttacaaatgaatatggagagttgctttctcgaatacttgatgggaccttaaggacaaacgggctagtgtttccatcccccgtgtgctaacgtaatcttgtttattttctgtctgtacgtctgattccataatgtccaatgtgtatatatatttccattcctttatttacattcttttccttctctggacttttttttcaaagtcaaagtatgctaatcacatttcataatgcacttgcatacccgaggtaatcttcagatacgggcaaatgtttgaatagctgcatttgctttagagtatctgtactctaggcccagactatcaaagaacatagcaagagggctgttctcagtctgagagggagaccagttttaagtgagtgctttccaaaggtttacttttagacaatgctgccctttctgaaagtgcctctgctatctgctgagatgctgtcctttaacctcaagactcacttctgaaatactgcccagttgatggttgagtagatcagtatgggttctctctgaaagcatcaactgaaagtccattttgtttttcatctgaaaagcagatgtttcaccatggtcctcaacatgtagttgccttgtctgcttgatattgtctgagggagagaaaatagcttagtagtcagtgtctggtatcaacatcaatttcagataaacttcaacataagaaaggaggagatgggaactgagagacatagtattaattgatagaatcaccaaaaatcagagcgaaagtaatatataagcatatttaaggctgcccacaacccttgggcctgatctgacttagtataacccaactaggacttggctgaagacccaacattttatagcagtttctatcttgctggttctgaagacaggaattaaataattataataagtgaatgataaaaattttgatatggctcatagaatttggaaagttttatcttagattaaggtaccgaaaggacacagttgtttaactcatcctagcactaaaaagtgttttccatggatggtaaaattgggttagatgactgatgaagtaggtgtgtgtgtgtgtgtgtgtgtgtgtgtgtgtgtgtgtgtgtgtgtgttttccttgctggaaggtggacagaaagtcgaatgcttcctaaggtgcttcttagaatgttccagcagggctataatcccagtccagaaaggcgtcctcagcttctctttccaaaggctatgggaaatgcgactaggtcacactattctgtccttaaataataaaggtgtcatttaaaagaagagctatgatagaggcttattttatagaagttaactgtgtatgcatgcttgttcaaaaggtatgtatttcttaacataatagatattgaattgtaaaggaaaagtgttatttcagaagtctgagttgagctttgtgttgcacaggccctgaggtttgtggtgacatctgagtgacagctgtggaaatcacaggtcttctgggggagtcttagaagctaacaatggacagataagtccgggataaaacatcctaattttttaaaactctttcccaaatagggaaaatgacttcattagcagtcttatgtcgtgtcacacactttgctctttgttgtgatcacatactgggcagaagcaactcaaggaaagggaggtttattttgtttcactgtttagggcatgcagtccactgtggctgggggccatggagcccccagcaaaggtgggtcgcattgtggcagctgatggcaggaaggggctgtggcgaactgggcgctgtactgaaactcttaggcgcacccacacctatgactcacctctgccagccatgcctcccattcctaaagctcagcagccccctgggatattgccaccagctggagaccaagcgttcaatacccgaacctatggtggctgcctgatgttcaaacagcaaccctgatccaccttagcgccaccttctttttattataaataccactgtgaactgcaaagagttttcaagtggaagggtctgccttgcatgtgtttttaaggtcagttatgtgttaggtactattaggagaattttaaaaatttaaaaattaaatgtcagtttttttaaattaagaaatatattgcctggtacaagatttcagaagctcgagaagagccactttgctcactctcattcttaagccagactgctactttccttataggcacctcaaatgtctggtctcctgcatttcattctgcacatacttcatatgtgtaggagatgtatgtgttttaaataagtataaagcttccctcttttataccactgcttcctcacagcaaccttgcttgtccccctcacactattctcttcaggaaacagtagaacttgaaaataacatgctgcctcactctttcctaaaacgtctctagtgtgaatgaagcttattttgttttaatgggcacctactgacgttcattcatttattaatattgctttctgtttagttttcccttctgaattcattttctacatttagtcagggctcatagtattagtaccaagagatagaatgctgggcttgggagatggctcagtgttaacagcgctagttgcttttccaaaggacccaagttcagttcccacagcccacaagtcagttcacaaccatctataatttcagttccaaaggatctgatggcctcttctggtctccaggggaatcacagagacgttcatggagagagaacacctatacacataaaaccattttttaaaatgggtatttattctgtcctaatatctctgaagtgtttgtgtgtagacacctggcaatggggacactggtgacctggccaattcttgtccctttcctcagagaactcatctggagtgttgctcattgctggaatcatgggtttcaacacctactggcaaaatgggaagtctcaacctctcacttgtgattcggattcctctcacacaggctttatttcatttggaggaaacaaccctcactgggtgagatgcaagtgatgagaaggaagctatcattgattaggtagagctgatcagtgacaaatcatgagccacctcagttacagggtaagctggctacagactgtcaaaacagcagaactctgacttcaaccctgagattattccacttatgtaacagtgctgcacaggacacggctggcatatttcataaccagcattcttaaggcagtgattggacctactagtcagaccacacagacatggaacagagctgcccatgccctgtgcaggaagcgccaaaggcacaatcagcaggggaggttgtgatgctgggccaccgagtttgccctgcttactgtacttgaactcctgctctcttaccgcactcttattttgtaccaagagctttatttcttaaagtgtagtatttagaaataaaactaatagaaaaaaaacgcatagggttgatacaacttggcaagatactaggatggcggcagtcgttttagacagaatttattttttcttttgtcacagagaaaagcagcatgaaaggagaatttggatttaggatttttgttttgttttttgtttcttcaggaaagcataaagttccacatacttagttttaatctcggggaaagggagcctacgaagtgccacagataatgatgtttactccttagccctatggtagtttagaaaataaaaacactaaatgagatgggagcaagcagaaggaagtctttgtgttatcacaaggtgtgaggggcagtgagaaaacatcacaggtgtctgtgtgccttctgagatctttgttactgtgtttagtctggtggtgaggaagagaggagcggtccacaaggaatctattgtcagacactgctgcacccttctttattctgactgtgtaagctctaagtcattatttaatttttcttgtcgtcctctgaccttggagaaagtcatcagccttcactctgaaaagaggagcggtcagttttcctcctgcacgggaaaaaaacaggtttgctgtcccgtgattatgccctgtaacacttctgtttattatgagacagagtcttacaatgtagcccactctggtctcaaacttgtgatcctcttgcatgaatcgcccaagcactaggaatataagcatgtgccagcacacacaggttgttgagtgacattttgaaatatagttaccatgacagtgccttgattttgtagctacagagtgtggtgccattggcatgttcgactggattgttccttagagggtctgttctggtgtttagcagccttcttggcttctgcccactggatggcagtaacggcaccccactgggagacgaaaatcatctctacctgagaacaattactctagacatatttggtggccccacccactcctctgagaagtgaagtgagatgaaaagtaagaaggtggttttacaacttagaaagcattagcagcttttcaagagcctttttgataatatggtggttgtgaggatttggtaaatttggttaaaggtgagtaagtggagggtggtgggtggacatagtgggtgcagggtctgttcttgtatggtttgcctatggaagaaagatggagggcagcatgtgaagggacgggttaagggaggacttgtggccttgaatacattcaagtgatggcaggatgaagtcaaggagacagaaattcttagaggagaagagaaaatggggatgggcagcttgaggcaggatgagtccagagcatagggagaagggtgaattttaggacggatgctctacaaaccagagacttttgggggatgaggaaggtccacattttattgctatgattggcttctaatttggggacctttggagggaatgttaggtctggggttttcttaagactcaggacttgtaccacagtctacataatttctggatgtcctggaagccattggtctccagatttcatggttctgtgtgggatatcaggcgtatgctagaatgctgcactaggactgtgggtcaggttaggggatggggcccacttgtagtttagagttctaggagacttctcagatgtcacagaacctacctgcggctcacctgcagccagcctgccttatattaacaaagatgttattctcacgatgttttccatttctttattacattcatttatcttattgagaggggatggggacagatagctagagagggatgggagagatgaagtcagagaatactgtctagggtaattgtgctgctgtgtgtgtgtgtgtgtgtgtgtgtgtgtgtgtgtgtttccttcttgagagaagttcaaatgtctggctctggttcaattgctctgtgggtgtaactgaagaaggggcctgaggaggggcaaaagcaattaaaaccttgaacatcataaatgcccttcctaattaagtggcgaggatggaaaatcaaggagctacttcagctgtgtttctgttcttttaaaactttgctgaaaagccagttgttcatgtctttcagaaaggacggaactttcagaataaccctgagaaaaagtttccaaagttgtctcgctgtcatatgctcttttacgaaccttcccctttgatttcctgggccctcttacctgtaccctctgcctggcctccccagcactccagtgtggaagcgccagacgtgattctctagtctatgaatggagacagttcaagtatctaactgttgtttcctttgttcacattgcttttggtgcttgctgggaaatgctctgaaaactgaactggggactgagcacaaaagccaggcgatgatgtccctcctggtaaacgcaccgtgtgacttgttcccactcctgttcacgactcattagtccctgggtacagaaaaggttgcttctctggaataaagggaatagatgcaactcggagtcctttttcgccctttcctgtgttttatttgggtgcgctcatagttctccatcttcattagtgacctggcagggggctggcacagtgctgagactagcctttgctggttccctggagtgtatcagagacctcagaactcaataccccactataaaaataaaataccgtgcttcaaacgaccttttgatggaacaaagccacacatcccaatctgcctgggcctctcaaattgtccccttgccaagcacctccttagattttgcacatggcttccctgcccccacttgcccatccttgggatatggttcttttggttggcctgtatgtcagggaaatgattttgtgtgtgaaaaatgcaggcttaggaaaagatctggtgtctttcaagcaccgcatagtagcttcttgggaaagagagggggcagatatttgtggtctttcacacctcacgtgtgtgacagtcacctcggggttacacctaaagtgtagagaagtaagttgaagccagtgataccatgaaagtgagttttagagctggagaggtgggtcggtgcctaagaatccccactgctcttcccaagcgccctgctgcgcgtccctgcacacgtgaccagagctccacaacctccagctctaggggatgcaatacctctggcctccaagggtgcccgccctcctgtgtacaaacagacacatgtgtacacatattaaaaactgggaccataaagtgggttacatattcataattcaagttaagtttctagattttccagcgtggcccaatgattgtcttatatttaagttcatagggaccttttcctgactctggatccacatgcgtgtgaattttataatcctgtgtggtgctgacgtggaagtgctactcatcagacccttctagaaagtgtttggaatcccctgagcattgtatctttttaaatgtttagcatttagctgtatgctacagggtttggaaactgcttgctttaaggtagcatgggaaaggaaacacagagacctttctgggttgaacgagctacctaaccttggaaaactcaatgcttccaccctttgtttgttttcccttggtagttgcagtaatagactccaatgaatgactttaacaaggtcttttcaattccttaagcaaagtgtcaaagtatattgctattttatttcaataatattttatttaccattgtgtgtgtgtgtgtgtgtgtgtgtgtgtgtgtgtgtatgtatgtatgtatgtatgtatgtatgtatgtaggcagacatgcatgcatgggccatggtgctcatcatatggaggtcagaagacaactttcaggagtcaattcttttctttgaccatgtagttccaaggattgaactcggtctttttctcaggcttgagagcaaatgcccttacctgctgagctatcttaccaactcctcaataacatttttaagagcatttgaggtcttagcttttataaactattcagtaatttaataaaatacattttgattctgtataagtatagtctatgcaaatctgagatgcggggtgtttgtttgtttgtttgtttgtttgttttacataaattggatagtagactctctggtttgggtcctggggatccaaccttaaggtcttgcttgagctaagcaactacatccctatctctagactcctttaaaagaagtttctagagataagaggtagatcttttcatagttatctatcatttcattttatactttaaaataattgtctggctccccggtcaccaaagcaatggtgtggagatagcctgctgttctctgagtatgaactggggagtagaattgtaaagtcactgataatacattctgaagatcactgggtatctgcaggatcgccagactggttcctggagtcaaggcatgaatggaataagaagattttgctatcgtttttgttggccaacactgtacttttagacttactcatttatctaaattaatttgtataaatgatattcaattctaagttgtatttctatgttcattaataaagttgaacacttttctcagtatattagtttgctattttattttgactattgtgacctattggagacatatttataaaccatgattttaatttaaacatcttgctttttaaaaaatttaattggaattattaaatgtctgtctgtctatctatccatctaattcataactactgtgtatgtatgttttatatatatatatatatatatatatatatatacacatacatacatacacacacacacatatatgtaggtatttgtgtttgtgtgtgtgtgtgtgtgtgtgtgtgtgtgtgtgtgtgtatacccaagtgaaggccagagttgatgtcaggtgtctttctctatatgtgcgtaccttatatttggagacggggtttctcagtgaatctgagctcagactttgggaatctgtctctgtcttcccacccagggttccaggcatacacctttgtgaccagcttttatctgcatgccagggatccaagctcatgtctgcctgcttacacagtaggcactcaacccaatgaaccatctcctcggctccagagattactttcttttaatcttaaagtttatgcttttagtttccagggccagaatgttaatcacatttacttttagactttacctcgcctgttagttatctttggctgtagagacataggagaatcacattttggaataagatgcaacaatttagtatctaccagaaaaccatactatattatggataaagttttaaagatttgtgtaagtctgaaaatatagaaaagattatccatagcatatatataaagtttaacgtgtacacacacacacagaggtggggatggagagggagagagagagagagggaagaagagggtgagagagagagcgctataatttcagagaaataaagatagatgccaagaaatgaagcatttacttacttggtctatagagtagggaaaaagaggaatggagacaacgataagaaaactgaattaaatacctaacagaggagccttgtagagagtgaaatggcatgtactggattctggagggtcaaccatgaatttggaacaaagtcagtataatttatgagaggtgatacagaaaatatgtcatcagtgataagccaaaatcttaattgaagacaaggtgaaataaaacattctaagtgttataattcataaatgaaacatctacaaagaagaaaaatgctcctaaatggttacatctggatttaaaaaaaaaaaaaaaagtttaaagcattttctggaagaaacggtaatttctcctttctcgcataggtatctataagaagaaaagcagatgtgtctccaagcatgtgtgcacctgccatgagacaaaatgaatagttacttttgaaagctggctctagttgtttttttaatgttgcttgttaaattaaagttctcttcctggcaagtataggtttataattaagtcatttatcatacatgtccttttggctccatttgaaatttgatgatatacagaagcaatatgtgggtggtttcttagaaatgagagaaatgagttattttattagcatttatcatttgatgtataggttcttcctgtttataccaaacatggaatgctgactaattatcggcaactgaaggaaggtgaaaggtcttgatcctgaaaatacgttgggaattgtattttcaacctcccaaccctccaggaatgtgctgcctaatagaaccatatcctgctgtggttatgctaaggggtcgtctttggagctatggattccatatttctttccttcaatttcataaatgctttccgaattagttttcctactacctaccttgcttctgtctcgaatgattcttatgtccacacactcagaagtattctcacttaaaaattcatcttggttggtgctctttacagcctgcatgttatagatgacagaaacagatccagaaagaccagacacattcatacagtgctgactagcagaactagcacttggaactgggtctcactccaaacattaccatttttctccttgctcataccatagttcttcatgagctgtcacctgaaattcatacttaattcataattaaggatatttttatccttaattaggttccttcatttttgaaaaggacagacatctgaaggatgtgggcacacttacgctgcattatagaaaatgtgtatttatctgggtatggtggtatatgcctttaattcctagcattcaggaggcagaaggcaggcagagttctatgagttcaaggccagcatgctctacagcatggtgagttcagaccatccagggatacctcataagactatgtttataaaaaagaacagaagaaagacagaaggaaggtaagagagaggaagggagggaaggaaggtgggaggaaggagtaagggaaggaagacaatctgtctaagtgtatgttgaacctctgcagttccgttgctgaaaaaccagctcatgacagatggcactgttcttcatctatgtcttcaaattatctgcagtttagttttaggccaggttataatgttagaaagcctggactcccatctctttcttccaccctctggttcttccctcctatctctctcttccccctctctctccctccctccctccttctttcttttcttttcttttctttttttttcttttttttcttttgttttcgtttttttttgttttttgttttgtttgtttgtttgttttgtttttcaagacagggtttctctgtgtagccctggctgtcctggaactcactctgtagaccaggctggccttgaactcagaaatccgcctgcctctgcttcccgagtgctgggattaaaggtgtgcgccaccacacctggctttcttttctttttctctttctttcttcctttcttccttccttccttccttccttccttccttccttccttccttcctctctctctctctctctctctccctttctttctttctttctttctttctttctttcaagaggagggtaaggagcataaaccattggtcttcaatcatggattccatagggtagttgaataaaactcactcttctcggtgatttatatttattgagggaggcatggagtacattggactccaccattccatgctgtcatcaatgtcatgcaatagtctgcagatgagatagatcctcctagatctgagggtttggaaacaatgaaccatttgtaaaatccatgtagttactgtgcatcttgcacatgattgtgtgttcttctttgttttggctgtttgggaagatgatagctgtgtttgcagcttccccttacagttgcacaggagttatctgtattttcatatgagcttacctcatccctagtgtcactgtctttctctctctctctctctctctctctctctctctctctctctctctctctctctctctctctcatttctctgtgtagccctagctgtcctgaactcactttgtagaccaggctggtctcaaactcagaaatctgcctgcctttgcctctgcctcccaagtgctgggattaaaggcgtgcgccaccactgcccagctgtatttctctttaatctcttgttttataattgtttatcttatttgtttgtgttgaatgaatttttataagctaccgtaattgttttgctggtgatagatataaatatgaaaggacatttaaattttcctgagttgataactaaatcacattttactagggagatcatatgtttatgtttctcttccttattttacattgttaattttggatttctctctcctctagtacattagtttagagttgtgtttaaataggatttttttttctaaaacactggtctccttttaatttatgattttcttagttcatagtgcttattaaagattcatgtttaatttttataaaaagttttatttcttaaaagaaatttaaccaaattaaatatgtttttgaatagcatagaaatagagaaatttggattctcaaaggtatgccaactatagtgatttgggtgaacttgtattaacaatttttagcctgttcccatggcacaatttcttgtctgttgtctaactcaatgttcagtggtaccttaggccatcagagggttcacatcctatttttcttcaagttagcctttctctgttccatatcctctcctgttttgggggctggcagtccttgagcctgctctttcaaggcatgtatatggctcccttgccagcctgtgctaattggtcacctggtttttcaattttacctacatctagacttgaagctggccgtttcccatttctctagccttttccaagtgccttgtttatagtctttcttaatcaagccagcactaagaatttttggttggaaaatgaagaaaaaattcagggatgtatgtttttagtttcattgtttctgtctgaactactacaaaagcctccttttctgtgttctgcccccatccctctgtgtgtgtgtgtgtgtgtgtgtgtgtgtgtgtgtgtgtgtgtgtgtaagcagctctaaagaggacaccctggagcagagacctgagtgaagtaaggagccatgttcatggtatgtggtggagaaggggtggtgttttggtcagagagcaaagcattcctatacaattgttatgtagcagacactatgttctaagggctctggagacagcagtggactagactgttaaacatcaccattgtttattgtttaactataccatctgttctttttccacagtatataccatgatttaaaccctttgtttctttaattgtttgatgtttttgaagttggaaaacccaacatgggaaagcccctttgttttccccaactgcttatcgctcatattgttttctactggtttgatctaatgcccctagcatgaagaatgccagtttgtgctacaaactctcactctacctttatttaatcatcattcgtaaggatgtgtgaaagtgtcttaggttttcagtgtctggggtttgacccaggctgtagatacacataaaacaccctcatcataattaaatagagatagtatttattgctgttgctcagctccaagcccagcctatgacctcttttcttcagcagtagatatgtacacacacagtcatagtttggaacttagttccatcaccttcttactgcagttaagtaggctctgtgtcaatttctcaattgccagaagggcatccttctagttgagttgtaaaattcatgtttagtaagtccccatgccattgaatgttaagaattataggaatgaggaaagagaagaagaagggaggtggggggggggggagggcggagaaaaaggagagaaggaaaaggagagaaagagcaagagacctgtgcagatttgcaaatttgattgtcctctggtggcagctgataggtggagtgacaacccaacaaaggacactggaaccactgtgacgtgagcgaacccaataccattactgttctgctcagatgaaattcatgagaggttgcccagttctcctatggagatcacccatttgggcagaaagggtttggtttctaagtttagagctgccaaacaacagagggaaaaagattaaatctgaaaggaggcggctcattccacaggcttctctaggcacctcaaggagaatcaaagataaataaacactgttttatgagcagtgtgtgtgtcaggggcggggtgcaggacaggggttaaaatttcaaaggagagggaagttctcctactttcttcctgatcagacacttgtcttatgattctacttatgattgggatcgtttgcccatgtaaacatgtgtgaatttgctgggcaaggtagaagacagagtccagtgttcttactgtaaagggaaacctgatcaaatattgaggtctttattatgaagtgaagcattacaaaccagctcacacctgcaataccaacacttggaaagctgaggcaggagtgcagccaagagttcaagggcattgctacagaaaaagttggcctgccagggatatataggaagactttgccttaaaaaacaacaaaaatgtcttataaatcttaactgatgtttacttgcttataggttccatagtaagtcatataggaaaattctggcccgttgcatagatgtttaattgtggaagttagtaatttttttaaggtagcatttgaacttttagtttggaccttctatagagctccgtaggttatccttttgcttcctgggtgtggattctggtctctcatcctaatgtgccttgaaaaaaacctttatgtataattttatgtaatgaataacgttaaccagaggggcttaacagtatttagttggctaaaaataattcattattgtcatagatttatagagccttggagatctctcccactactgccctggttatttccttcttgttgagggtaaactgaagccctaggaagagttgttaatggcttggagatgggctttctgctagtaaataagcatgcagggactctacccacagtctgacctcatacacagtctcttccatacaagtgtgtgtcatttgaacagctgagagctcagtattatgtgcagtgtaggaagctaaaataatttgctgtatggacttctagggactaaattaataaaagaatgcaatgaattcccttacagttcatagcctcatgtgtcatcaaaatagtttcaacttttttcctttaaatcttttataagaaactatgagctaaaatctctacactgagttctcatctattgtgggttttgttcctgctctggggagcaggatgataaaaaagcaaaactgagtgtcccaaagtcaagaggccaaaggtgaacaaagggactgtaaggagtggctcccctcttactcctctgaattcagggtggccttgctgagactaagccagtcttactgcaacagcgcttcatgtctggctgcacccctatactcatctcccctctctttatcccagtgtaccaagtcaatttaaaatgttagtacagagaaagggaggggacaaaggagaggaggctatgttatttactgactcatacagactacttcagatactggtcagtttgtaaaagttacatttaagggcctagagagaaggctcaataagaagggtgcttgttccctaagtatcaggtcctgagttcaaccctatcctccaccccacagtcataaaaaataaactcaccttgaacagaataccataccagtatgtgatccaggtgctagggaggcagagacaggaggatccttgaggctaggcagcatagcctggttggtaagttgcaagccaatgaagagaccctgtctcaaaacagagatggcgagatggctcagtgggttaaggcttttgctgcctgatgctctgagatccctgcagcccacatagcaggagagaacttgttcctgcaagttgtcctctaacttccacaagagcacaatagcaagggcaccaccacccactcagagtaaatagatggaccttaaaaaagtaaataaaaaaaataaggtggcctatcaccaaagaagacactcaatgttgtatgttagcccctaaatgcacatggacacacatgtaactacacacaaacatgtgaccacagacaaacaccacagatgaagaaaaggttaaacatcaaattaaaaatgtatcagaatcattgttatgtatgaacaatataatagtaatcagtgttgtaaaagtataggggtttcacaggtttggtatgccttgttttttattagaagtgctagttgacatttgttaggattagcactgtgacttgcgatccctccttctgagttcctgttagggaacagggctcacctgatcagttttaagaagggctgaaataacctcctttggtgtgacattaatactgtttatcttggagacagttcccagaaacccaagggaataacatacacagagagcgggttatatctgggagatttttatttggcatttttactgctaacaatctacagaagtttagagtatcatgccaggcgggcttaaggggtggttttctatttctgtaggactttgaaaggttggaagacttagcagatgattatataacatggataggggaatgcggactcgggcttctatagaaccccttcaggttctgctacaagttgcatttatgttggtcttgagagaattcaaaaggcatagtaggtctttgaaccaagtctttgttgtacagacttgggagcactgcccctctaataaatacgaccgtgcctgattcaaaaagcaagtaaacttagagagcatttggaagattgtcttcagctgcactgtaaagtgttgttattcaactgccaatataccacacattctaccatgggctctaagccccatgtcagtacagtggaacctcagcaaacctaggaccagggggcagggtcatctccagacatcaggtctcttctcacatgcagactgtgtgaaatctggcctggagggagggttcttgtaagctgattacaaagaaatccatcatagacttcattcactccagatgaatctgagaactctccttgctcttcttaatgagctattctttaatcacgcaggacagcaggttggggcttgtgagctctctgaattcttaaggaactgaactgagagaatcaaatctatgggtttactgtgcatgcacaggaatttgctaaatttgtaaggtttttatctgatctttacatgttctattaatacggggtgaacacatctgttaagtttgcccaggaggcataacttgttttggaagaaactaaatggctccctcccacctcgtgctacatgcagtgataccttaaaacaatggaagaaagtttagcagtttgtcacttctttagtttaatgccccatcccctattgagaaaagtttcctgggctctattaataaatagcaatatctttgaatgcatacaggacaaagtgctagggattctgtggtattacgatatctctgggagtgccctgctttgcacacttcccttagttacccgaactgtgaaacaagagtctgtaaataatctaacgttgcttctagctctcaggttctctgatccttcctttagataataagatgagtgatgttcatacttttattttgctttatgtttgtccgtataaaatttaatcttttctatgtgacctgccttgtgtgcagaaaacttaaagttgctagtcataaatagtgatttcaggcctggagagatgtcttagtgttgaagagtgaggacttgggttcaatttctagcccccacatggtggttaataggtggctaactggtaactctagtgccaggacctcagacacccttttctggcctttgcaggaacagcatacatagtgcagacatacacataggcaagacactcatggacagaaaattaataaatatttttaaagtatttttctctcttatattataccctgactacagttttgccttcctcgtctcctgctagcctcccccaatctactctgcctttgtttcccttcagaaaagggcaagcctcccagggataatcaaccaaacatggcatctcacgtggaataagactgagcatctgccctcatattaaagatggatggagcaattcattcagtagtcttgcgcgccggactggccagcagtaacgacgctgtaacaggatccttctgcacacgtttattgggagagcttgattgcagaggcgaagagaccccgagcccagaactggtgctgcttatataggcctaggagaggtgtgtctcacacccggattggttatgcactacacctcatttgcatgttcctcatctgattggctactctctctctctctgtacctcacagagcctcattatcatacctcatttgcatgtctcacatctgataggttatactctcaaagcctcattatcatgcccgggccaggcagtgtctttgcaaaaaactttactgcatatgtacacattggttgtttgtccaaacttatgcgtggtggccagcagtagtcagcgccactctgcaactgcacatgtggcttcccacacagtaggaggaaaagggtcctaaaagcaggcaaaagagtccaagtcagcctcccactcccaatgttagaatgaatgaagagctacagaatattgtgccagattaggaagatgttcaagcaatcatacagcaacttcaaaaaccaaatcagaacccgaaaccaaccaaagaaacaaacaaaacactgctatgtcgacttcacagcagcgataatggcataattacattagaagtgcttgggaagtgataatttttttcaagattagaatcaaatgatccatagcttgtcaactgtaataaattttcttaagttcacaaaaagaaaaatagaaaaatttgaaggaaaaaaaaaatccacaaatgaaattggccagacacacccagttactaggattttataattctcaaaacctcatagaaatgttcactgttagaaagtaacacaaccagtgtgtaaaccaaaatccaagtccagatggtcatttgcagacacataaaatgccttctcatagctcaactgaccactttgccaggtcctgatgtttttatcttctgaaaaagattggggggagctactaccaaggaaactctgaaatgccctacatctggctctactaatcttaaccgattgatatgaaaatcatttttaccatttctcttttattctcatgatgcaaatccaaggatagaccactcttaaactgtcacacataagtaataaggccctgaccagcagctgactgagacatatgtagataatttcacccaaccattggactgaagtctgggacccctatggaggaattaggagaaggattaaaggagctgaaagggagggatatccagaggactaaacttaatctaaagatgatcaacagtgttggtgtcacagtggagttgttaacattctcatttttcccagatttgcattgcctctagctaaatttacttggaaatacagactatgcacaatggcacacttatggaggtcaaaggacaactttttgtcttgttagttttgtccttctaacattcaggttccaggaattgaacttaggtcatcaaccttggcagtaagtgcccttacccgctgagggatctgactgactccattttttttcagagtgtggtattactatacttcagttttgttattacttcaccagagcatcatgttatttatgcttgagaacttgctagtcccaaggtgttcatctagaggttagagactagggatataattgtgactgtgagaaagccgtggctcttaagaagctttgctgtcttgtttctaacctatgtgacatcttcaagaatagatgttgttataattttatggataacaaagcagagactaaatgagaagagtttccaggattctgtagtctgtgactgaccaacttttagtttaaccttttatctgattccagtctgtattcagctctgttacattgcttcagggtagaccagtagtctatctctcctcgttaagatgtttgttgaagagtcatttggacatacacaactaagtatatagttaaactggcagggatagaacataggctacaaagttcataaagaatatttcctctttaaacttggtgcaagagagccaaaaaggacaatagaacttcttactcagaacagaaaaaaaaaattagcaataaattaaccccatatttagaatacttgaacactcgaaattataaaacatctttgaaagaaattaaagatgctaaaaagaatggaaagatgtctcttgttcatagaaatacactctaaactgatctgcagatccaatacaatctctatcaaaaatttggctgctactaaatttagttgacatccagaataccccacccaggcaattttttaaaaaaaatgaaaaatgatgttggaagagttatacattgcatttcaaagacactataaagtaatagttattcagataatgtggtgctgacatgcagaaaaaatggactagaatgaaaaattgagaagtagactcctttatggctacttgatttaaaaagattaacaattttaaaaatgttatgtctatagtattttacctacatttatgtctatgtatcatgtatatgtagtgcccacagaggacagaagaaggtgttagttctcttagaactggagttaaaaggtgattgctgggatcaaacccatgtcctctgatggcactcttaaccattgagccatctctccagcctgatggtttctttttgataagagtgaggaaagaactccttaacaaataacattgatagaggggagttacacaaccatgtgccaaagaatggagttgagcaacttcataccatacacaaatggatcaaacaccttaatatgggagccacagctgttgaaggaagtatagatataaatgttgtgactttgaactaggtaatagcttctcagatatgacatcaaaagcaactagcatgaaaatatgacttcctcaaaattattgttttgtatttttcagtgtctcatcaagacactagaagtcaatccataggagaaaaatattgtaaatttataataatttctaataaagctttaatagttatctaatataaagaattcttatatcaatccaaagaaaataattcaattaaaggctgacaaaatatttgaatagatatttcccaaagaagatacacaaacaccaattaaatatacaaaaaatatactcaattgccttattcatcagcaggatgtgcattaaaaccataataaaatagaggcttatattatatggctatactatatggctataatttaaaaagaaaggcaatgacaagagtgtataaaaaccttgaacctttaaacattgctggtgggagtataaagtggtgcagccatagagaaaaatgctttcattctttaaaaagtcagagtacgttatgtatggccccacaagtttacatctaatatatgtcctggagaacaaaaagtttccccacataaaatgtgtacatatccatcatagcagtatttgttgtagtcataaagttgtaagaatagagatatctacgaactaaagagtaagatatgaaatatccataatttaccattattttgtgatgtaagaagcaaagaactgatacatgctggacaaacactgcactatgtgaaaaggaccagtcacacacgactatattgtatacttgcatgcatatgaaatgttcaaaataggtaaagctataggaacagaaaaggcattagtgagtggttgccatgctctggagacagtggggatatggattggcttagtaatggacatgtttgtttccaccagggcaatgaaaatgtcctgtagttatatattagcaatgatttcaaatccctgtatacagttagaaacagcaaatcgtatgctttacgatcatatgttgtgtggttaaatatcttaataaaactgatgcatgcatttaaaactacatgttattttggctttgggagtttgctttaatctactctttcaggtatctgtttataggtggattacttcaacaaacagtgtaatctcggcttctattttctattaggagctctaagctctttattattttaattatttggttttttttatgtttttggtaggccttgcttctcagtccacgctgatcttggaattgtgatcttcctgcctcttcctcccggattctggaattacaggcaggtgacatcatgattggcttttaatttttctttctgaattttttttttgccctactttatatctggcagccttattgcatacaagtaaaacctgacagaataccatatgatgtcatgtttccttcttgatctttttttaaaccttaatgataaaataatagccaaaccagagtgtcctgtcataattatattgtttgcaaatgtcattttcaagggtacacatttgatttagaaactactttgcctatattttctgctattcatggcactggatgaccacacacttgaaatattccctggctaaagcaccagcatcctggaggtcagtgtagacatgactcatggtttgatagaatgcagtcaggttgaatatgactcttatgtggctgtaagcccaggatacgatatgaattcatacattgcctttcttttgtaaacatgatattcaagtcggttttctttttttgagggctttggcacagtgctggggagaagtatgagtgtcctacccaaagcattctagaacaggaagcaacattttctgagggaaatgaggagcttagtagacagaagataaaatttccactgaagatggttcttttccattggcgtcctcactgagtattccaggggtgtggctgggaatcctctgctgcatgcccctctgttgagagtgattggataaagaaaccagttatttggggcctgatgtgtagacaacaaggagccacagttctggatgtggtatttggctcgggcatccttactagtgatggaaatgtggggctggagggaaagtagactgcattttagactcttatcagttgaatgctgaatatccctgtagacagtgcctgctaagttgttggcatacttgggaaaagttctatatcatagcctcagtctctagtaccacttaaatctcaatttttttgtcacttatatatttatttacttatttacttagttatttatttattatactccatattttatccccccccctcaatccaccctccgactgttccacatcccatacctcctccccaccctcctggctccacatggatatccccaccctccacccaacctgatctctaaattccctggggcctccagtctcttgagggtagctgtatcatctctgaatgaacacagacctagaagtcctctactatatctgtgttgggggcctcatatcagctggtgtatgctgtctgtttagtggtctagtgtttgagagaccttgggggtccagattaattgagactgctggtcctcctacagtattgctcttctccatctcagcttcttttagccttcccctattcaacaacagggctcagctgcttctgtccactggttgggtgcaaatatctgcatctgactctttcagctgcttgttgggtctttcagagggcagtcatgatagtccctttttgtgagtgctccatagcctcagtaattgtgtcagaccttgggacctccccttgagttggatcccactttggacctgtcactggatcttcttttcctcaggctcctctccatttccatccctgtaattctttcagacaggaaaaattatgggtcagagttgtgactgtgggatggcaaccccatccctcacttgacgtcctgtcttcctgctggaggtgggctctataagttccctctgtattgtccgacatttcatctaagatcccactctttgagtcctgagagtctctcacctcccaggtctctggtgcattctggagggttctctcaacctcctatttcttgaggtttcctgtttccattctttctgctggccctaagggcttcagtccttttccctcacccaataccagattaggttcccctttcctctcatataccccctacccctgtccactttccctcccaggtccctccctccttccccacttgtgattgctttcttctctctcccaagtgggactgagacatcctcacttgggcacttcagcttgttgactgatgggatatagaactaatccgagaatttacagctgagaagttctaaagaaatgttcaaagtccttagtgatcagagaaatgcaaatcaaagtgaccctgagattccaccttacaccaatcagaatggctaagatcaaaacctcaggtgacaacacatgttggagaagatgtggagaaagaggaacactcctccattgctggtgggattgcaaactggtacaaccactctggatatcaatctggaggttcctcagaaaattggaaatagatctacctgaagacccagctataccactcttgggaatatacccaaaagatgacccaccatgtcacaggtacatgtgttccactatgttcaaagtgaccttatttgtgatagccagaagctggaaacaacccagatgttccacgacagaagagtagatacagaaaatgtggttcatctacacactggaatactactcagctattaagaataaggacatcctgagttttgcaggcaaatggatggaactagaaaatatcatcctgagtgaggtaactcagacccaaaaagacatgcatgtatgtactcactaataagtggatattagcacccccccgccccagtaaaagtacagaatacccaagatacagtccacagaattcaaaaggtcaaccagctaaatcacgtattttaatcagctgttttgctttttcccaactttccctcatcatagcctaatctttccactctgtcacctgactccttcagcttgcccttgtcacagtctagtctttccactctgtcacctgactcctccagttgagctccctcagttcttcactcaccttctggttgttggtttcagtggtttaatgtggagatggtatgtttaaatttgttttgtttattcacgtaagttttcaatctagatgaacaggtcatccattttacctaaaccagtttgggttaatcagcttttaccatgggcaggagtgattgatgcctgttctatgacttttctttcacttgagtttgtaaaagattgtatggtcccaaggtagaaaacatttaattattacaccaccttgctcttcggaagaatcatgagttatctatgccttgttattcctagaagaaggtcctgaaaacatcctaagataataatagtctagtgatttaaaaaaaagaaaaatctgttcaaaatctaggccatcccacttaccattttcatactagagaagttgtacttataaaattcttgcattgatttcctctgagaaagtgtattcactcttctcatttatgtttctctgttttactaggtaaaaatttaatatggtttgtactagttactccaccactaagtaaggaaaattctgtggtacaggactctatggtcaagacagcatgacggtccaagtcaaaaatctcagcactcaggggacggaggcaggaagaccagaagttcgaggctaacctggtctatataatcagttccagaccatccagggtcatagaacaaaactcttgtctcaatggaaaacactagtccatatttatccttcagatgtttgttatttgaatttaagttgtgcttgaattgagcataagaagggcctggagacaggcatagtgtttcctgctcagaagcctgtaatggccaaggctgagtcaggaaggtaacaactccgaggatagcctagactatctagaaagaccctggggaagagcaaaactgaagaataaaagtaaagaaagaaaggtcatgagaactcttgattttattacctggaaagactgataggctatacaatttggggactttgaccctaattctgcccaagttcctaactagatatcggctatccagtttggctgtcacacacaggaactacttagaaattgttaaagaaagttcagtgaaagtacatttaggtcttctgggaagggtaggaatataagatagggacaacagtgcctgtaagaagcaccaccagctctgttctctaaggcaccctgtggcatgaaagacttaaaattgtacagtgatcacaggagggctgggcagcagtagaggacgaggtgattaactatggagaaccctgctgtgtctaccttattacttggagattaactatggagaatcccgaggtgtccacctcattacctggtgattaatgatgtaaaaccctgaggtgtccactttattacctggtgattaatgatgcaaaatcctgagatgtccaccttattacctggtctctacttactgttcctacattggtaaagggataaacaaaatttgtcagtccatctcgatgttccctttgcatcttagggaagggaagcaatatgctttttaggtctttggatccagagtctgattaatgggaaattttgttttcatgcccataaataaaaataataatcattaagatttattgagcacataagaactgtgacaaaccctttaaggacttttcttctataccaatttctctaccaattaaaatatttaaagaactccagatagcatctggaatacagtaagtgtccaagaaataatgctgatggagacgtgtgaataatacttggttgtaactattactgggtattacgtctcaccttcaagaagtcagttcttttatcaagttttccttcctattttcctatacatctagggtcagacttgtttagttctattatctgactagttccattttgtatgtcctaagttgtgtgattgccccacccccatcctacggaagttcatttttcaaattatcaaggtctggaccaaatttatttagtgacaatgtggactttcttcctttgtacaagatttgcaaaaggcaagtaagataactaagtgaaaaggtctgctcaggctcttttgatgtggaggtggtggccgtggtagtggtggtgacagcgctatggtgctggcaatagtggtgatgaaccagacaaccttgggaacaccactagataagtcaccattttggcaggatagctgcatttcaggccaaaaatcagttttttttcttttaaattattaaattctttcattgtcaccaggaaactagagaaaatgaattcttcacagtatgctcaggcatgcaacttgaaacggcttgcacgctaagtgaaattcagtgaaagccagctgtttgggaaagagctgtcaggagattagggggctctgttaaaggagagttgtccaggaatacgttttcagaaacaggatatcagtgtagggaaagcaagcacacttacacactccagctcccatgtgcttacactgttgcatgtcttttcagccccttcatcttaaattattatttattcttggtgggtaggtgtctgcttttaaggcttcttttcacgtgtgaaatgcgtggcagagcttgctttttttgagaagtaaagacagtccaaccctgcttcagtgccctaagtactttgattttggttaaattgacaattcagtaatgcttagcaaaccacttccttcaccctgttcttgccaactacgcccagggaaggaccaccttgggcaggttgccagaggtgccacccaggtcccctgaaatggctgccagcaagaagggaacaattataccccaaaccagactccaagcagatggttgtcagtagcgctgagtgtcggatcatgaagcctttgatttgtggttggtctttgtgtttcctaggtacttaattcatgttacctgtgtgatgcgcaccctgctcctcccagccttgctgctcattgtataggcatgtgttaaaccacctagcactataagcctcacccagatcttctaaccctgtttgtacagtagctagctcataataggaactctgtcaggccctctagctgtacctatgtcctatacacggccccaccttttagaaaattttagaaaagtcttttaggattttattttaaagcgtaacatacccactcaggaaattcggttagcatccagagttgggaatcctagggtaatgtttcactcctgcagcttttatctcaggagcgtctccttatgttgaatttttctgctttcaaccccatttagcaatagtgttctgcaactcgcttagagcccagtctcagctgccttcctttgaggtcctgcctgcttttccctcagcatcttactttttttttttttttttttatttagaatgcaaacccacagtccctctttggactaatgtaggaagtcacatgatgatagggctcccagttatagctcccgttacagtgtggatgctgaggtacctgctcccatgcagatgcaccaagcacaggggtgtgttttcagtcagagccatagtaatctcctggccctaccctcatcctgcagagacaacaagagacccaggcttttctccacccagacaatcagggctagtggagtaaatgtacttttaccatttccctggcttctctgctgtgactgcacatatctgagtgagcaagcgagccagtggtggttgttcctccacatctgccctcactgggtgagggagtgggccagctgggtcagaggtgcctgcattcttctccatcttttgcaagatgtctgccaaagcagaggcattgactaaaaatgagctgtggttttaccagtgaccatgttggtgtgaatgcttgctttctgagttctagaactgctcctggtaacttctctgagcatcctccctttttctcacaattgaactccacagtagactcccaaaatattcttcctagtagtcaggatgtcctgaagtgctcattctgggtgtggtgctctgagtaagttggccctgacaggctcatatgttagtatgagtcctcagagagtggcaccacttgaaagggatttggaggtgtggctttgttggaatgggtgtagccttgttggaagaagtatatccctggtgttgggcttttagccaggcccagtgggtttctctctctctcctttctgtctgtggatctggatgtaggactctcaactacttctctagcaccatatctgcttgtgtactgccgtgctaccctcacagtgttgaaaattaactaaacctatgaagttgaaaggatgccccagtgaaatggcttctttcataagagtttccatggtcatggtcatggtgtctcttcacagcagtagaaccccgactaagacactatgggaaggttctactgatttctctgcctctgagttcagtccaccttgctccgttgtcacgtagagagctatttgtatcatgaacagtacctccatttcttatcattcataacacttatactgagcacttgttatatgcaagtggctgtgctaggactgctgtcagaaacctgataaaccgtgggcctgttccagaagggcttatgaacctcatgacctgtgaggaagtgtcttcctgaatgccactgtcagtatttcctttgttccccaccgtcccagggtaagcagtccttgagtatgagatgacaaaatgtatgtggagggagggaatggtgacaaccttagatgtaattctgtagtcacagtctttctgagttcttggcacattttgacatggtgattcttggttgtaggagtttggatttaattctcatgtgcttaaagtgagggtgattgtttttagttcagccataggaaatcaaagccagaagctaggctgcagctgtgcctcagcagaattcagaaggatggtggcagcagcacccccagctgctggccatagtctttggtcagaccgggccgtgcattctagatgcttttaagccagtgcactcagcacttaggaaatcagaccattaagagtatagggtatagtgtgtgttcagaaggtgtgatatcattgtttatggttgtttagagatgtgtgtgtgtgtgtgtgtgtgtgtgtgtgtgtgtgtgtggtctgtcctgtctgtgggcgatgtgcactctaatacaggtgcccactgagtccagaagaggctgttgggtctctgggagctggagttacgggttactgtgagctacctgatgttgatgctgggattctagcttaggtcctttggaagagcagcgggtgctttaaccactgagtcttctctccagctcccttctccagtcttaatcagatgatgttaagcccccgaatgaaagatcaacaaagatttaatcaggcaatgagttttttcctttcccatcttgggtacatagatatcatttctccctgatatactggcagttatggcaccttcctgttttattatttctgaaatatctgtgataaatattagtgaaaaacatccgctcctgagtggtggtgaacccacacccatacagcccattttctttgtacctgtgtatatgtgtaacacttgctgttcttccagccgagctgagtttagttcccagcagccatgcctcacaactgcccttaacttctcttccaggggatcccaagtcctttcaaggcatgcatgcattccacttacatacatacagacaaaacactcatgtgtaaaaagaaaagtaaaccttaaaaacaaaaaaggaaggaaggaaggaaggaaggaaggaaggaagaaaagaagagaagagaagagaagagaagagaagagaagagaagagaagagaagagaaaagaaaagaaaagaaaagaaaagaaaagaaaagaaaagaaaagaaaagaaaagaaaagaaagagaaagagaaagaaacaatttgggttatactgatctgtatactgactatatagtatatagactacatactgtctaggtcatagaataacttttaccatgcaatctgtgtagtatagttgaacggctactttttctctgctgttttataccatagtctttttgttttcttgtatcattatgtgtatatgtgtgtgccacagtgcacatacggaggaccatgtgtgggagtcacttctctccttccaccccgtgaccttaggtaagatgccttactcctggaccatcctgatggtctatgtcttcaaagtggagctttttagggatacatgcaactttgtaaatttaatacagttgtatctgatggcttctgtgatttgttttctactacattgatataataacatcacagtaagaacatctgttttgtcagctttacccctttctgtgtgtttgtacttatcaaatatgggctaaatatttcccaggtcaggcttcacagtcacctgtttcatatagaagcagaggtactgatattggcaaatcttcaataattagacatcaaatgatctgacagaactattaattacatattttatgtgcattgctgccttttaaattgattttttcatttttatttttttttaagataccatagaaagtgatggtttccatcgtgggcatttgcataactaggttttgctgacatcgtcctggacttcttcccatcccatatctctctgcaatcctcccttcagtctccatctgcccggtagactcctctactttcatgtcgcttgtatcccaaagttgcggtttcttgattgcttatatatatccagtgctgtgtggaatatttcatgtcggatatcatttaatcatctgagtaatttttagtatgaacgtaggcttttgacttcccaacagtttcagtcgggccatgtagagcacgggtggtaatttatcaagaaaatgaataaaattagaacagcagaagccaagtcagttaaatcttgtttagatataaaattatcttgtattctcagaagattttacacgttgattagtgagaaagtgcagccctgttttgaagcaaagcactaaaaagtccatggcactccgtggagaatgtttacatctcattagctctctgttaaattactccatttctgttgcagttcccaactggaaatgctgggagaatttgtcaccttgctgcatgcagcgggtccataggctgagcgtatcagtttccactgctcagctttggttcagcccttatgggtttccctggctctgcatcctaacgaattgaactttcttctgtaaagaaagtcgggaaagccagaggcaagaaaagctgcaatttcttcctttggggaaatctccaatgtagagttataagcaaatattaaggttcaaagtaggcaacataatgagtaagttcaaggaccaagcaagcacttatgtaacattgtgtgcttgcaaaatgttttacaactctattattaatctctttaaatctcctggaaggtaacaatgttattacatctgttttatatgcaagacaggcaaattaagtggcaaaaaggaagagaacttcagacattggttttaaggtttggatctatatcctaaaccacactgctgcagcagggagatgcagttcattctagacttgggagtggtgcccatttgggccgttgtttctgtgtgtttaaatcgtggctcagtgacttgtgttccagggaatgactagctgaacattatgtccaatggtcatgagttctcaataaaatgtggcctgtgctatggccgatagattagtgactaaccaggtgatctttggtttgctctagctggagtcaccatgagactaacaaaggtgtggtttggaagagttcacaccagtggctgtccactgcctgtaagccactttttctctgctattgtgtttctttctttcttttttttttcttttctccactcataggaaagcaaatttatattaaaaagtaataacatttctcaaaaccccaaaagggtaaaatgtacaggttttccataacagaaaaaatggaaaataactcagacccctaatttacatggtagagggagacatgataaattattgccttcagttaacttttctttcatttacagagtatccaaaaactgctttcacaccctgaggtgtgaccagaaggtaatgaagagtgatttttaaaaataaatatttcataaggtgccctggtttaaatgagaactgttctttaacatagtcacacttaaactgatccaatgatgttgtcattacaaaaaatatttttagaacttgtcttttgaatgccttaaataagccatttatgaactgtaaaagaaaacagtctcatgtatttttaatcaacccctcccttgaaaagaaatgtattactcaaatatattactgatgctctttttagcctctgttctcatcagtttttctcttcttgttttctttctaacattgagtctataattttttgaaaagaaataacaatttgaaattagtgagggtgtttcactttaactttctattttgaaatactttgtacttgcataaaaagttatgtaaatgctatagtttccatatatccttcactcagcttcccttagttctctgctgaatttcttaatttctttttttcccattctttatttttatttatttattttttattattttattttttacactccatattttatcccccgcctccatccacactccaactgttctacatcccataccccctccccaccgccctggctccacgtggatgtccccacccgacctgatctctaaactccctggggcctccagtctcttgagggttaagtgcatcatctctgaatgaacacagacctggaagtcctctacagtatgtgtgtcctcatatcagctggtgtatgctgtctgtttgatggtacagtgtttgagatatctcgggggtccagattaattgagattgctggtcttcctacagaatcacccttcattttctatgttttagaagtctttatgtatttatcttacagttattttgaagtgtaaaattgttaccgagtaaaattatcctgaggtgaaacacacacacacacacacacacacacacacacacacacacacacagtactctgtgaataagtacaaatatgacatcaattttacaaaatgaggccagagagatgaaatggctcagcagttaaaaacgtgctgttctcgcataggacccaagcttgattcccagcagctacactgggtagcctataacttctgcttccaagagtctcatgcctctggcctcatagggcacctgccctatacatccccttccaatccctctttaaaacaataaaaatgaatgattaaaaataaataaagtattcgtgtataaaatatataaatattaaaagctgtaccttctcactctcaattaaatgagagatttgtcaattttattaatcaagaatagatgtctagccttttatttttatggtgctgaggatcaagtgtagggttttgcacatgtgaatgctctacttttggattttaaaaataattctcccttttgtacttttattttccccatttcatttttttcttgtttttcttttttaggccttcctcatattagaggtctgcatgtgttatcttttcttcttctaagttcttgcttcttttttttttaattgttttttatttatttatttttttcaagacagggtttctctgtatagccctggctgtcctggaactcactttgtagaccaggctgtactcgaactcagaattctgcctgcctctgcctcccaaatgctgggattaaaggtgtgcgccaccattgccaggccatttttgatttttaacctagcccttacaagactgtacatttttagccttacaagactgtacattttttctaagtaccattgtagctatactgcccaaataagaatatatagcagtgtcactaacttttgattcaatgcattttctttattcagaaagagaaatggtgtagaaatagtgtgcatcccttatataaaagaggtgactctgagtcttcgacctgagcactttacccacagaaatcagagggcatgttcccattcatgtattctaagttaaacactcctcataaactgataaaactagctgagacttactctcaaacttctcatattatattctctctctcttttttttttttttttttggtttttcgagacagggtttctctgtgtagccctggctgtcctggaactcactctgtagaccaggctggcctcgaactcagaaatcgcctgcctctgcctcccgagtactgggatcaaaggcgtgcaccaccacgcccagctcaaattatattctttctcttctggtcatttaaaaagcaagtgttagggttgggggaaggatatataaatagtctttgagggtctagaaagatggctcagtggtttagagtatggtctgttcttcctgggttcaattcctagcacctacacagcaactcgcaactgaagtttaactttaagatctgacatcttcacacagacatacatgcaggcaaaacaccaatgcacataaaataaaaaaaaaaatctaattatttaaaagagtagtccttagacacaggagataactctgtattttttcgttgtcccctttataagaatcatagcttaaggggaagctcaataatgacagctgagttgctctactacttgctaaatcttcaagtatttattttttattttttaaaggtttatttatttattttatgtatttgagtacactgtaactgttcagatagttgtcagccttcatgtggttgttgggaattgaatttaggacctctgctcactccagtcaaccccgctccagtccaaagattatttattgtaagtacagtgtcactgtcttcagaagcatcagaagagggcgtcagatatcattacagatggttgtgagtcaccatgtggttgctaggatttgaactcaagaccttctgaagagcagtcagtgctcttacccacagagccatcttgccagccccctcccccccatcaaatatttataaaaccagaggaaatgtgttaactcttttacatttattcattttaaaatatatgtaaagaatacgtatacattttaatatactctaaagaatttatgttattcttctacatttgtactgaggccctgttcctaatgtgagagtgaaggtcagaggataatctgcggtttccttctaccatgagagtttcttggaattccatttaggtcgtcaagcttggctgcatgcccccttctcagcgagccatctggaaagtccattaagaagtagtttatgaactcctccatctaactcatatatgtgtgatgtgcatgtatgttgtaggcacatatatgtggaggtccaaagttggcttcaggttactccactgttttgaggcagagtctctgtgcttattaagtcaaactagtgtagctacctagcttgatccagggattccccctcctcaggaattctgggattaaaagcagccaccaactttcctggcttaagatttattttaattatgtatctgtgttttggaatgtgcacatgtgcaggtccctttgtatgtctgaagaagaccttggagacctggagctggagttataggcagttgtgaacctgctgtgggtgctgggaactgaagttggatcctctggaagagcagcaacagctcttaactgctgaaccatctctcagcccctgcctagcagttatgtaggttctggggttgaaactctcctcctcatgcttgttggatgagggctttattctcagagcatcttccccagccttccgtataagtcttgattactatccaggcatcatagcccatgccctaatctcagcacctagatgacagaggaaggagactcagcagttctaggtcatccttactacataagttcaaggccaatagtcagctacatgagctctttctgacctcttccccctaaattcatgaataatagcatgggttttactgagtgcttgttatattttcagtacttttctaagtactacatgggctctaattcctctgaacctccagaaactcaatgtttctgcttcactgcagcaatattaccttcagaaagaccacacattttatgtgtagaacacgttcgttctggagcctgctgttaatcactattgtgctgtctttcacgtaggatgctgacagagagccttatcctcaaatagcaaagtgcaataattatttaattgtagaaaatataatcaggtattttagggggggagagtcagaccatttaaaataaatctctgtgtgagaaaggcttttcaacatataaaacttacacaccataaaatgcaatataatcaaatgcttaaggagattaatgtatagctagaaaatccattataagctgagtcaaatggcaaatgaaaatctggaaaaaatatcacagaccatggacttctttttctagtgcataaagaacatctccaaataagcaaaaaaatgatgaccaaacttagaccaaaacttggttaaaaactagagataaatcacagaaaaataaaaacaaatgtattttaaacttttgaaaaacatgctaccttctttcatagagctaaaaattcaaatatcatttgataataaataaatattcattgattacattattgaagatccttaaattttgttcaggtctgagttggcttaagtttagtaccacactattgatagaatgctaaattgttttatattttgtggacattttattaactttaaaagtatgtatcctttcactaaataatctaccttaaggagtttttttttccattttactctcatttaaataatattcctggtattagtataagtattataccatttcgtaggatagcagaggaactgggggaggggcggagaccatcaacatgggattgaccaaataaattggtctgtatcatagaatagtgcagaaaattttattaaaagaacataggctttttacattagtaatgaaacaaaatccaaggtgccttgtaaataaagcacaccaaaagcaaaacaccaacatgccagcctaagttgcacttttttttttttaaatagatcgcttctgtttcttaaaagattattccagcattgagaaatgatatctggaaacacatgacaacagaggctcctctgcactgccagtctcctcatagtttatcgcatgtccagacactgcctgttcccctaaaagaaaattaaccacatccgtgtaagcaatttaaccttttgaaaagtgggattataatcaactcctggtggcatttgaaaggttttactgaaaagacctttacgcacatgaaacagcgtggggtttcatttacacttcttggacagccagctctgctggccctgttgtgatctgactcagtgttcctgcaggttctgagtatctcataacaatgcattaactccctgggttccatgattagtaggccgtgggctggggacctgtaccatgatagttatattatctggcacaagtagacgtttgaaaggtggaagtccttttctcaatttagaagaagtgtaatttttagtggaagtgcatcttataataagtatacatgaaaagtggtgccttcattttggaaatgtctcaatggagccagaaatcctgcctgatgtaggttcagccttgtttttcccgttcttcccgatgctccgtgaggcaactgaggaaacagggtcatcacagtaagtcaagcctctgcattcctgacggcagagcacgagtgttaggaaccccctttttttcaacagcagattgctgcgatgcggtaccttctgatttctaatgagacacgaaggcctctgtgtacaagacagtttcgcacttagatgctgacggctttgttctctgaggccatagaggttatttttcctaagttggaagagtagactagcttcttggtgtacactgagtttgcaagtttttttttctttttcttttctcttttcttttttgttcttgctgatgttcttttttaatgatgaatagcccttgaaattctgtaatactaaaggggaaagtcaggttgtcttattctcatttcaaagatgagatggatgtacagttgaaagagattatgcaactttctcaagctctcatggaaaacaggtgacaaagctaaattttcccacacaatgtcatattgggatgagaaatgcatcctccttagcgtattacatcaatgaatcgtgtgctttgagaagcactcgggccagcgggaacatcgctgaacctcatcccaggcacacgagaaaaacggtctaaatctaggcctgtgttgttcattcatgtacatagcattcagaacaaagtcagttctacatcaggcccttggaatcgcaggccgtcagggagtgagaaattgattgtcttctgttacttctcctttttaatcccctcattttctctggttggtgttcttagatgccagaggccagtcgctgctgccagatgactgggctctgctggctcatcaaggggccgtggcagcacttgtttccatgagagctggaagaccagatgcaatggaaaaagcacaggccgttgtttctaagtagctggcagtgtgattcacagtggcctgtataatgtgaatggaatctgatagctcttggaaccgggcttcatgagtaaagttaccgtgttggcaagctgagcagaggcggagtgcttggttaacatgttcatatccgggcttttaggaataatctgtgcagtttaacttcagctctttcgggtttccaagtagactagatattcctgaaaggggtattgcccaatttctaggtgtatttaagggatgtgatttttgaaggcaaattcctttttgtgtgacaagtaaattaacattaaacatcatgtattctgccatgaaattcagtggtaggttgttcttaggactccatttctagacatgcgtggtggcttatgcctttggtcctaaggctgagatggctgaggcaggagggcctaggagttcatgataacataaccaagccttgtctcagcaaggcaaagcaaaaggacagtgaatccttctacttctaaagaagcccgttctcagagtcatttaaaaggtgtaagaaatatagtaggccccaggggtctcatgagggcaaatgaaaatagagttttcaaagtagttgtaaactaacaatggagtcacagcagcataataactcataataattcagatgttttcccagggattttctgactttgacataataattatgaataaatggtggctgcattatatacacctgtgttttgtagtcatgtagtttctttatgctaatgttgttgttccctatagtaacaacaaaaatatgttcattagactataaatattcatattcatccttagtcctttccttgtctatcaagctctatccagccttaattcctaatgcatttactgcctttttttgttgttgttgtcatttattgtctttttctgggtaatcactttgctcttttgtgtggcggggggaggggaactctggataattgcaaatgtcttgctatccttatggactaatctgtgttctgtccgcctacatcatcacaggctttattgtgagtcgcagtcagaagagttctaggcaaatgagaagggttttatgttgcgacacctccatcagtctcgattgctgagctgaagaagaggctgtgcagtgactcttgtgacagcggaggtgctctgaactccctggatggatgcctcacctccagcatctgctccatccccagaagcgagcagcttgttttccaatcaaggcgtactctgcaattcgacccttttttttggaaattaggtatactttccagcatatatgcttagaggcccttgggtatttgaaccatttcctagtctactttcccagacataagagataccatgtgtgaagtatgtggaatgaaaatgtcaaggtgtttgggtgggttctttctacagaaaatatatttgcttattgcagtttctctgcgaagactttaaagtgatttaaggacagtttaaaatcacctctttagagctgaaataatttatgtctgctgtgtaaatagaaccttccagagtatgaaccgatgagccacctcaactcccacctcttttatgaagccttcctcagtgcccttgttaataagaagagtagtcatcctctgcttgcctttcccaaaacacattgacctttcctgagcgtggtaatatcatagcccagtcgaccttgaactccagttctttcatctctttctcgttcacttttgaaattagagaagggcttttgttaggctcatgcccccccctccgccccagctatacatcccaactgttgtactaccccatgcccaccctacctgggttcccctctgcctattgcctcctcagtgctgcgattatatgatcttaaaagcaattgccatccacatactgtggaatgattcatttatgtagctgtctcttctattacactctgaattccatggggacagagccatgcttctccacctgtgtttcccagggccaggcgtggtgctggcacacagaattacgtttctattggatgaatgctggactttattcatcttgcgtatatatggatttggaaaggcaaaagcccattttccacagttaactgtactgcaaaacagtttgaggaaactattgcatcttatagtaacatatccatgtacatctctggagagctgtgaatgccagtgtattccacttcattacatttatctttcatggcaggaaagttatgtttgtttccttttactttaaaacccaaatttggtagtctgtcatttcttgtagaaggttaaaagttgattcaattaaactttttttttgaattcccattatatctagtgatagaactgcctgtcaagtggcctgttctaccattttccacctaagaaatgtaagcagcctgtgtcttggcatcacacctaatgcccaagttcccaccatagcgcctagagagtatgagaggtgatcaataagtatctactgaataaaatgtatctatgaacaattagaaaaacctatagaatttcttcagagtagaagttggttttactgtttgggaagggttggtggggtccaatgaattttcagcttcaaacagctggaactgcttgaatatgatattgcagacttagcatgtgagtctggcattagttgtacccccgtccctccccaaattgatactgcttcctttgtttaggagcttaatattacttctttttgtatcgcttaaacatttccctagagaaacagaccttcagaaaaggtaacataaggagacaccaactggatccccaaagctccccagccagtgcatcttttgtaagtcacatcaaatagggtagctgcgcaggattccctgtgaagggcttagagatgttcgttatctctgttctttaaggaaatgactttgtaaaaatatattactgtcaagcaagtaattgtcttattctcagcaacatgaagcattttaacctctcaagatgattttagtaactctctgttttgaaatgtagtaagtagtttgtcattgaaatatttttttaccccaaatataactgcctagttatgaggtcttctcttggatgggatgaagcaaggtactcagaactgtctgctacattaaacctttctcctgtggtctcaaggccctggtctgctttgggggaaaactacagaaagatctcttggcagtggatcttagagaccaccattttggaactttcgtttcaccggtgaagaaactgaagtcttgaagtcttaagtgacttgcatcaggtcacacaacccgccgttggtctcttgagaactagctcaatcctggcttttctggtatgactcataggactttctttgtagagagaagacagatgttcactcccaggcaaacactagcttttgaaactgtcaaaattctgtgggttaagacttcagagggataaatacatagctaaaaaccatttaaatatatcacattattcttgagggagaaagacacatacaaggggaaacctacacatcacagataggatcttctcacgagtgtgggaagtgatggctgtatttagtttatttagaagtcagtagtgctgagccacagggcattatcaacagttgtcctgaagaggatgatcccaaaggacagatgtgactgggaaggaaacagcaggtaaacattggcagggagagggtgtgtcagttagaaaagattgcactcagttccagcagtataatccacgtgcctcctcgccatgagcaacttttatctagtgcacctgagagtcagtgaaagggattgcagtgtacagacctgtaggccctgctgccagcatctgatgcccaagaatctccaacttttaaaagtccgtgtgtgtgtgtgtgtgtgtgtgtgtgtgtgtgcgtgtgtgtgtgtgtagggggtggggggttggagagattgctcaacagctaagtctatactgtacttacagagagcttgaatttggtttccagttcccacattgggtggctcatacccccctataactccagctccaggagatcctcaaacacccaaatatacatgcacatacccccatacaggcatgcatgcatacccataattcaaaattaaaaacaaatcttaaaatttcctatatgacatggagtccagttggtgaagtatgacttgaggaactggaagaatggcttttaaaaaaataaacactggacattttgtttaaattaaaatgaagatatttgtgttaattttattcatggatttaattcaagaaaatctatataatagaaagttgaagaacaggcaggggagtaaagcaactgacttagttgataggcgtgtctgtttctgttgcagtgtagtcacaaactgagcagcctaaaacaacattcattcattcacagctcacagttctgcgggtcaggagtcagggacagtgctggctaagttctctgtgtagactgagatcaaggtgtgggccagcagttttcatccaagtgtgctcctgttgttggctatgctcattcctaggcagccttaagagaagccttgtctttccttcttccctctgctcctggaacttgtttgcttggagatccgtagaggatgcctctcaggggagtatatatgctagtcagagtgactcaagaattcctggctgtatagcagttggacgtctcctgggaagttaatgaattggcattgttattatattcatctgtggtaatggatgtatttcataacatgaaagagaagtgggcctcctcttgctgtgttgacaagattgagttttaagactaagtttccatcctggataaaaataaacacagtaagacaaaacacagtattgggaccatttcagagcctatctgcccactcaggcatcacctctttatgactttaccatcattcttgttctccagatacatcagattaaaaccaagatctaaaataaaatgggaaatttctcagaaattcaaactaagtgtctagtatttttttaagttagtctcttgaaaccttctctgagtgagatgtgagtctttggtcttgagatctctaagcaatataaaaatttgaacagaaatgagatcttgggctactcagtggtagacggtgatatggtaaatgatctgccatttttaaatgcctagtctgacttgtagtaaataattattaataaatctcgacatggggtttctatccactttagaccatttatgttttcggatgaaagacatacatagcctttacatattaatatatgctgtaggtaacacaatagctgggcagctgcctaccctccatgttgttagaatctttttttttttactgattataccaaattattatttactatttactgttttatttgagctcatcttagttccatttggctagaccatggggccattttttttttatttctatcctatgccagctctctctctctccctcctttaaattcttttttccccatggtctcttgcttcctttgttctctcttcccctttttgtggtctcctctctctaagccccaaccccacctatgtctcttctccctagctattggctgttggcatctttattcaccaatcagaattaacctgggggcagggtctcaggggctatgtgcagactcctggactttggagtcgatgaatagaagtgcatgtctagatgaaagatgaactttagtctttctatttctgagaaggttgaacctttgttttagaaactgtcatgtgtctacgatgattttgataaatcagtatatttagaaaaaaaattgttgagattaacagattacatgaaattgttttcagcagagtttttagcctgagaaagagagaaaaaaaaatggggcaggggtggatataagaaagtgaggactctctggtgtgtaaactaattagcctaaacagtaaggtatttgattaggtgcttgagttagcttcagtactggggtggccacgcacacatactcagtgacttttttttagcttttttttttttttaaagttaaaactgggtgcccgtatttgttaattcttccactgaagaaagatacattcatttttcagttgaagaccttggccagcagtttcaccaggctgcattcagtagggtagggatagttcccagtttaatggacctctagtatatagaaatggctgagtaggaagggtgtgaggcagtagtccaggcatgctcgctgtgtttcatcacaagaacattctaacatggacttcccatccatcataggttatttttttctttttattgcatgtggcagaaacatgaccctaagtttaaagagaaaagattcccctagacacctccacaaatatataggctattggcattgttttcctttgtccacaagagtttgacggtaagactggtaaggccctgttattggatactgtcacactttggtcacagaacatggagaaatcaagccagtacttgctggaagcttcctccctgctggctagcttccataggatctgaaggtgctatgcaggctgctggaggagaaaagttgacaacagcctttcccagctatgaacttggtgggctacactaaggactggcaaggcaagatatacccataggtacactagtgtcatgattattatggctgtgactaacaaggcttggagcacaggaggagatgtacgcctggtaatgtaaagttggccaagtaaccatggctgtagagtcataggcctcagggatgcatccactatggctgttttgctaaacagaattgtatccacctgctttctgaatatgtgactatacccataaagatgcagctctctaccctcatcagagaagtgtctttgttcagtggacagcaatgcagaaatggacaactcaccaaagcctagagattaggtgtcagtggaatgcttacccataaaaggcacctctgtatcatacatgcctacttcctccagagttcaggtaacattgtggaagaaaggtcagaaaggctctaagagcccagggttgggaaggactaggcaaaacagtcctttctggagacaacaggaccactgcactcatgaacttagagcagctatagttacctgcataagacctgcacaagatcaagtcaatcagcattatggcatggaatgcagacaggctcacgatccttaccctttgctgaggagctatgagtgaccatggctgctagaggtggaagggtcagttctcttgaaaagtgtgatccttggtaggttaactgtgtcccagtggatggccttgcactcacacatatacagcagcatgaattggactctgggctataaaatagggacagggacatgaagttgggagggggtgagatagattttggaggagttaagggaggaatggggctgattatgttcaaaatacattatatagatatatgaaattctcaaagaattcataacaaatatatttaaaactttttatcttggggctggagtggtagcttagtagttgggaacactgatactctttcagaggacccaagttcaggtctcagcacccacatggtagctcacaactctctgtaatccagctctggtttgacacccttagacagacagacatgcaggcaaaacatcaatgcatataaaataaatcaattatttttaaaaactttttatcttttaaaaaagtatttttatgtgtgtgtgtatatatatatatatatatatatatatatatatatatatatatatatatatatatatatatatatatggagggagagaacacatacttctaccctgactttacagtgtcactgcccaagagctgacagtggtacaatagaaacatttattttgtttctggttaattgtgtgcttttcattttagtagcacatggagctgtatgtaactgtcaccactgccaaagtagcggtaatatcacttagaggccctcgtgtcctaacccctgcagccgcacttacctcgactactctccctgacaatctgcatccatcagtctgtttctcatctctggaactgcgttgcttcacagaaagtttataaatgaaatgatgcaatatgcatccttctgagatgtcctttttcactttccttaaggtttgtctattgttttttattgctaatatttctgattgcaatataccatagtttgtttaaccattcacactttgatatagatttgaatggtttccactttgggactagtatgaataaagcttttaagaatattgatatatacattttatgttaaactacattttcgtttgtttgctaggagagtaatttgggcatgtggagtaaatcttttcttaattatgaaggaactattaaactattccagagggctatcccattttacatccccaccagcaatgtctaagtacaagtggtccatcttatcctctctagcatttggtgttgacaatagtctttattttaccctctttggtaggatgcagggatgtctccatttgatgttcggttctatttccttagtgactaacggtgctaatcttcttacgtgctcactctcatctgtatgtccctgtagggacatgtctgcttcttttctaattggtttggttgaatgttgagtgtaagagttttctttatagtcaaaatgtaagtctttggttagatatatgttttgtaaatcttttctccaggtatgtgctgtatctttttaccctttaatatggtcattcatagagccaaagtctttatttgcttaaggcagagtctctatgcttgaattggcaaattttaacttttgatgaagatgactactttaaatatttaaaaaaaaaaaaagattccgggggctgcagagataactaagtgattaagagaactgaaggctcttccagaggtcctgagttcaattcccagcaaccacatggtggttcacaaccatctgtaatgggatctgatgccctctcctggtgtgtctgaagacagtgacagtgtacttatatatgtaaaataaaatttaaaacatcttttccacacatttatgatcaagctaaggaattttaggctttccccttcattttcagcctcgacgcaggtatagttatcaaagatgagtcaaactagtctacttacaatgtcgaaatgccgtggagtgactgtgtgtctgactctgtgtttttctcttttgtagtgttttaaatgagggataaaaggaaaattcagttctattaaggaagcaagatgtctttatagactaaatggacctgtgactctctttataccattgatttcataactatagacacctcacattaaagaaacacagctttctttgtttatgtgtgctttgcttttaggctctcctgaagggagcctgctgatttgttctaataatataggacatcatctagtgtgttggaattgcacaggctgggttaccatggtgaacagaatagatgtgggttctgtgcccacaagtttgccactttgttctatgtcttcttatgcataggcctgtgctgtctgccagtggttcaccgattcagctgagtgtccttgttgcctatctatcacaggatctttattgctccttcaaaatgcagcatgtcttgaatcataagtgaatgattttaatgctttaggtgtggctacattctgggaaggtgaaaaacaacccaagcaagtaacacttacaggcatatacatgagcacatattatgaggaggaaactgtcatattaattactttcttcccagctggggaaatatttttgcaaagtcttaaattacctcagggtgactgaaaacactaaatatgagactcctaagcccaccattcccttcattacataaagaagcgcttagccacttgaataagccagatagtcagatccctctttcatagttttaaggttttcttttagaaatgctaatcccatattatttataaaaatttgattccattttagttctatagattagatcatttttccataactggctgacttatttatagtctggttttgttatgacttgtccaaacacaggagacgattctacaataagttctaaactactagctaaaagtcaaaattaattatgaatcaatctgtagttgaatgtggtaccacatgcttgtaatctcagcgatcaggagactgactcaggggagtgaccctgagtttgaggttagcctgggtgatataataagtttaaggccaacctttgttatgtaatgagactattaaaaaaaatgtcaacattccaaattgaaattaagtttagggttcaattgttatctcactagataacaattttggttttgcctttacaactttgctttgttgtgagcaggatcatatatggcaatctacaggtggtttcattatgatttttactttattgtggcaaagatccgtgctgcaatttttgcaaatattaattaagttctcatgataaaactgtgaggtaggtattcttagtcccagtttgaagatgatggaattgaggtactaaagagttaggagcatgctccaagtaacacagttagtaagagcccgagcagggtctaatctagtccttctagttccagaaactttgttttggacatagataatagaaccggattgtggctagtcaggcattttcccagctaatacaataaaggcattgagctgaaatgtgagtggtagtatagaaaaacaaagcagatacatttttttgatagaaacaaaactagacctggagtcaaaaaatctgtactctaacatccccagtacaatgtgagtaacttggggaaggccactactttggttcttatcggtattacacatatataatatagatttagttctattaaaattctggaagtgagaggcttgaagaccaagtgttggcagggctgcatttctgttggaaaccagggagagagattcatttccttgtcttccagctttcagaggctgcctcttatctcgtcgtgaccccattttccttctctagagcttatcattcactgcaatctctagtttcattgtcacatctcttttctgttctcagtccacaatactccacctcttgcttaacgatagggtctttcttcatattccaggctgaccttgaacccactctggttcccaggcagggtctcactgatggcagtcctcctgctttacatctcagcactaggattgcgagcatgtgtcccaccttggctccctcctcctccttatgagagccacagcagcactgggtctatctggttgacccaggatgatctcctacctcaaaatccttaacacagaccctttttccaggtaagggagcatagttggacattaggacgtgaacatctctgcagcgtgttgttttacttgtcaatcacttcagttttgtgacccccgctttccttaactgtaaggtgaaggaacggatctaattcaggtcagtgaagtttcttgtttcctccatttctggtttcaagaggaaaatgataggttaaaaattaagaaaagggagagaagatatgcgtggtagcccacacctttaatcccagcactcaggaggcagaggcaggtagatttctgagttcgaggctagcctggtctacaaagtgagttccaggacagccagggctacacagagaaaccctgtttcaaaaaaccaaaaaaaaaaaaaccaaaaaaacaaaaaaacaaaaacaaaacaaaagagagagagagagagaaagagaaaggaaggaaggaaggaaggaaggaaggaaggaaggaaggaaggaaggaaggaaggaaggaaggaaggagggggagagagaagctaagatgtttatgtcttgagagccagtatattccagctgaggtttgaaagaaggatgctaaggggtagagggttcttacgggctttttcttaaaagatttatttatttatgtaagtccactgtagttgtcttcagacacaccagaagagggcatcagatctcgttacggatggttgtgagccaccatgtggttgctgggatttgaactcaggacctttggaagggcaatcagtgctcttaaccactgagccatctcaccagcccctcttacggacctttaaaagcagtgtattgctggatttaaacttcttttaaaaagccctttttaatttatttttgtatgtttgagtgttttccctgcatgtttgtctttgtaccaagtgagtgcagtggccgtggaggccacaataggcattgtgtgccctgagacgtgagttacagatagttctgagctgccatgtgggtgctgggatccaaacccaggtcctctgcaagaaaggaagtgctcttaaccactgagctgattctccagcccctgaaattctttcatcatcatagagcaatgagaatcaaggttgttactagtttgtatcacagaaaaattctgcctgtaaatggtgtaagcagtaaggacatttgccttcttattatataacgagggccctgggttggtgacccttcagctcagttacatcattatgcactcatattttatgaaataggttttgctagctatgctggatcctataccatgacattcctatcttgtcctgaactcacactgcccattactgaagatagaacaactctcatgcgacttgtttgctttacttggtccaaaacaacttttttgccaatatcaggaatgttctatatttatactgttcaatatagtaagccattaaccacacatgacaatttttgcacacttcaaagaaatgggtgctataactaagaaactaaagttttaaaattcagtttatagaaccatatatgtatggcaagtggccatgtattggactgggtacaactagatcaacaatctggggaagcagtcaattaaagcattcatttgtctttagattttgtcctaacttttgacccaaacaaaaccaaatgaataaaaccacaatacatatataaaggctagcagtagagtgtcttcgtggcagcggataagatgggaaatgctgatagattaggatgagtcagcagagctgagtaatgggcgttttgctgaggagccctgctgctgagtgtgcttttctcacttagggagctgctttgtttgtaggctatacattgtcctgccccaggctggccactccaaagctgggaaaggtcatggatagcatctgtatgcatccatccaatcaatatgtacaggccctttgttgtgagctaggtgttgttgtaggtgttgaaaatacagtaaagaggaaaagttgtctgttttgtggcccttggaactgttacaagcaaatgagcaatgcagtttcaaattatgacgagtatttagaagcaagtacagacagtgaggcggagtgaaggaggtaaaccttaacagttgtctagatccaggacttttcctggaagaactcaggtggtttgggctttctctccaggaagaagacttttggtcttatttacttttacatcagaaaataaaagggctcaagcatttgatataatccaaaaggaagaaaagtcagatgtgttcgcaagaagacactgatttttgtcttctatgcaaagctcagtcttgcctgccatgttctggtgaactctgtgtggccctgcacagagcaaagtttatttcttgtttgtgttcccatatatcttttgctttgtctggagtactttggctttctatagtgggtttctggcctccagctttctcatcataaagtaggattatcatcataatatttatgaatcatacggctctggaaagatctgtccttaatcaaaataattattaaatgtctcataaacttgtaggccaaagaaaacatttaacttttttattaaatttgtgcaaatcattcagtgagttcaggttttcattctcgcccccccctcccccaattttaaaataaagtagtcgtaggcttgtcaagaatggtaagaactggatcctgacaggaatggtagaaacagaaacaagcacagcctttctggagagccagttggcaggacaacagacagttctctaaaatatgcagatttacatcttcgcccccaaatataaaactgaatcagcgttcaaaggcatgtgttcagagacattcatcatcatgttgctcatgatgataacaggcggctcacagctcagtcgtttaatatagggacagttcagttatatgttcattgtcaaactgtgtgtagctattaatgtaatgatggcattaataggaattaatggctttggaaagaagttcagagtgttctagcatttatagtgtcccatgctgcttctctttgagcatcggcggtcaagagcggtaattgtgatcacttgtactaaccttgacattcgtagcatgttactgttgagtgctgaagtgtcctgggtagtatgctgagctccgctcaaacattatctcagtgaactttcagcctagccctactagcaggcacaacttggattattattttgtagatgagaaagcccactcttagaggaacataactatgtaaggccttatactgaatgataacaggggcagcattcatacccaaacatttatctctagaatcgatattctcaaagtttacagagaagcactccagcgtctttatatcctagtagaatgtcatgagaggcatgttgtggaaaactctttcatatgctttcctgtaactgtacctttatctgtgagtacttggttcccataagtggcagggaagaggtgggttaatatttaataaaaacacaggtcagcaaataatagctcatgggccaaagccagtctgatggtggactttgtaagtcctgttttatctcagcagcactgtgcttcattattatatattgtcacttgctgtctctgtgccttattgacaggaatgactagtttcaataaagattgtgtggtatagaggctaaaattaatagtatcaggttctttacagaaaaaaaattgcccatgcctgctgtaatacactagaagtctggaaggatattgatcctgtctcagtgattgcttttctgtttagagttcatgttcttcagtaggtacaggccaccagtgtccaggtagttggtgagggtttactgagaacatgaaccaatagcttatttcaggacttctgagcccctctgtgcgtggctggctggcattccctaactgggccatctgtgttgccctgacactcagactgttgctgcttctctgagatggaatgtgtattcacaaatgagggctccattagtcatggtgaatttcctgggccctggagacatggccatgacatcaccaagagccaatcagaaaggggcctctatagtccagccttcaatcctctttggaagactatagactaagtgttctgttcctagccctcagggtgtgatttgaaactgccttcctcatccagccatattctgggcacaaaagtctagcttctagacccaagaggcaagggcaagcttgataatctgcagagctggaggcagattgctgttgaacatttttttccatggcttgggttttttcttcccagagttttccactccaaatgacgttgttgctttctgtggcaaaggatgggtggtgaaggatgaaatctgcattagataaaagatggctggcagttaacatttctggataagtataggttggtagcatgacaaaaatcagaagtgtagtttgctggtttgttacattgcttctctgtatactttaacagcttttaacagcaactgcttttagcaaaattagtgtgtcttaaaaacaggctcattacccacagatcttaggatcttcctaatgagggttagcacctcattaaatcttttatcatcaagaagaaaagacccactaccccccacttctcttttggggggggatttaaatattttagacttacaagcctctttcttctcttccttttctttcattctttttcttctctcttcctgttcccatcccaatttacgagaatcatttgtagaattcagttttagaggtaactttcctaatctgtgttcaaaagcatctgttcaaatatgtatttctaattggctctgtctcttgttactaaactataatagttaaaacacctttaaattttattcaaggctcacacttgtaatcctagcacttcaagcggtgaggcaggagaatctcaaagtcaaggtcagcctgagcaagaacttgtctcaaaaaaaaaaatccattgatcctggaaattgagacttagaacctaagccaggtgtggtgcctgtaatactcaagagccttaagtagtccagagaagtaacaaaggtccagtggcagcctgagctgtagcgggagatcttgcctttaaaccaaaccaaaccaaacacaaccaatccccaaaacaaccctaggaaacaaaaccagaaaaaaaaatcttgaagtggactcatgcaaatagagttttatagcttaatgcagtttatgaaccccaaaattgtaccttctcccttcataaggaatatatctaataccttttcatatttttcataaaaatcaaagagaaattggcagagtagccttcattattagtttacctacatttactaaacattgcctctgttgtgttaaatttttcccttgttcctgcatgatgactatagtaataattatataatttagaggagttttatttttgaagcatcttgaaaacacaggcatttatccttattttttgaaactatacatactagtaactaagagatgcatcctctagaatcatgtaatatactacaaaagaggcacttaaaaaaatgcactgtagagttcttctcttaaaaatctctatgtccaggcctagagagatggctcaatggcttagtgcactggctgctcttctagagtatcagtgtttgatttccagaaccacatggtggctcacaaccaactgtaactccaggtccagggcatctgacacttccttctagcctatatgggcttcaggtagtcacgtggcacatatacatacacacaggcaaaatgctcttacatataaattaaaaattagaaatcaaaaacctataaagcatgactcattaaattttcaagtgcctgaaatatattctgattttagtttttaggtgaggaaactgaagtacagaaagcttgaaccttctatgagatgtcattcgcagaagtatattctgaaatgaaaaacctcattgtttcatcaaagcccttaagagaacagccctttgtgtaattccctgcttctattcctgttttctgttgataccttaaagctttgcctatgaacaaaatgctcattttcatattcttctgattgggacaaaccatcaggttaatgtagcttaggcagagctggggcaagtctgatgtacagtggctgttctgtgtggtggccgtgctctgtgtggtggccatgctctgtgagctctcccacggccttattcctaacaggctttacagtctcctcacccacccaccagttctcccacctgaactaatatttggcacctctttactcagatggttgtcatgactaccgatggcttgatgttgatagtgtccttcaaggctttttgggagagaggtcttgcagaagtgccgagtcagcactggcccctgagtgatcaccagaagcttgccaatcaggctaaccacacccctgacttcagcaaggcgaagccttaggagaagttctactgctgccttgagagaccacatctggatgctgaaagccagatgaatcttagaacaaccacaaatcaaggtctccatgatactcttgttttctacagatttgagacacaacagatacctccctcagaaaactcacccagcgggtgagcctgctatgttgatcattccattaagccctaaacctttcctgcagaagaaaaattctcaaacgtcgattccagaatatgtcagtgagaggtcatggcagacaatcagatgagtttatgagacgctaaaaaggagctatgtcactcctaaaggggctggcatcgatttattacagaaaccaagagcagaaggaagaaaagcctttagtctcattaaggaatccagacaaaaatcccacttaatctgtcttgcttttccttttcctgcagttcagctgccgtgcaggtgcagggcagcctggcagaagctttgaacatttggaaaaagaagtcattactgaaagtcactgacacacacttccctcggaatgctgctgatgtcatggaaaaccaggaccttagcagtaacccttaacaaccagagctatggtaaacactgagtgttacctccaccaaggcattggtttttaaagacctttaacaggctagggcttgccagccacaactcataaaaacgttcttataattctgccctccttactaaaagcctggacaactgctaaggtttctttgccactcggggctgcagagccagattcctgtcagttccaaggctcactaatcagattttacagcccttctttttcagttctctccatacccccccgccatgctcacggggctcggccttggcaggctcactacttcttcaaagaagtcccttgtcttactgtgttgccttgatttctggttgtgtagtgaactggtgtgcagggttttgcttaatgttttgacagactagtggttcgttaacttagtctgttaattggtggcctttatttacaggttacatttcaaccgatctgagacatttgaacaaagtggcatctcattattcaaactctaactaggtacggactgagtaaacagcatgggctgctgtggagaactgttcagcatggcacaagacactgaggtgggaagtcgttttctcccggcttgggttaaatagcattatttgaaccagtttggcttctttctgcttatccacacagtgggaagaggcaggaaccttgcattgcttttaaagagtatcttcaagttgaccactatatttgaccaccaaattgggatacttttgaagactaaggggctcttttaatagacaccctgttttaaaaacatccccaaggcttcccaaaaacaaataaggcatatggtcaccctcaacattgtgctaaaccctatttatcccaagccttttgagaaggttgtgttcacagtgctagagagcagaccattgagcttctctgcctacaagaagataagtccattagaaggtcaagcccaagtcatgaactccattccctaagttaaagctacaagtctggattgacactatgatctgcccggttttgaacacttacttctattcctggggaactgtggttcctaacgtgtgatcttgggtccctggaggccactgagatcttctcaggaggcctgtgaggccaagccctgctcagcaccatcagaagacatgatctgccttttccattccttctgtcttactgctttctataccttggtgccaaaactgatcttagaaggcagctgtcaatgaccaggccagaacttcagcagatttgtaagaatgtaaatgatgttactcttccactaaatcttgttttagaaaataattttccttgaggaaaagaaaaagtgttatctgtatcaaagtgttttggggttattttatcttatgatttttgcaaaataaatgcatcagaagtcatcagttacaattttttgtatgctaaacacaatcctgcagggctccaacaatttccaaaaagtttaacaactgtgactctagacctttgtttctccgcaggaagggatttgcagataaaataaattccttaataagaaagaccagccacgcatcattgtgtctaccacaatgtcttgtgtaggctcatactctcttataaatatgggtaggccaagcttctatgacagctctgaagtttccatgttctctgacatttgtgtgttacattcattcacattgttatgctcttgaattgtgcatgtgtgtgcatggaagtgcatttgcacacgtgtgcatgtgaacactgagaccagaggttgacattgaatattttctttaaccattctctaccttatattttgagagagagtctcctactaacactggcacttaccaattaggtagactgactggcgggtgagctctggggatccgcttgtctctaaccccagtgttgtggttacaaacatgcccagatcccgtgatattcttatgtgggtgctggagatccaaactcgggtcttcatgttgcaggcactctactaactgagccatctccccccacccccgtccaatcttccgatatttaatattacggtactcctattagtcttattttcatgttaacaataatgtcgtttttccttcaaaacatttatggagtatgccaaattctcatgcacagtaagcatattagattaaaagactatgaagcctgatagaaacggggttcttttgtgtgtgtggcactggggatagaagttggggtcttcttgcgtatgctcagcatgtgctgtcccacagtaaaggaaggctcgatgctgttgtctgttttaacctggctcattctgttccccttcatttcaggtgtcaccctcagtcctcctttctggaccaaggaagccatgctgacccaggggccacccactatgtttcatagcaccctttattgctcgctgtgcatactgatttgacttggcctactcacattttagtgtttctcagttaatttcaagtgcagttatgccaggagaggaacattgttcttcttttctcacatgtgaatacagctgttctcccttctctgcagaagatatttttcaagctgcagcttgggtgccagaaaccaatgacagtaataaccttatatgttgtttttatttgcccacatatatgtatatatacacacatatattcatgataagaagagtctgctatagtacataataaatgtattaaagaacatttaaatttaaatatacaggaagaaggaaaacttgagtaacttaactactctattaaagtattatagttcaatgtcatataacatggattctgtggttctgaaaaatagttttcttctggagtaaaagatatcagactgagaaagaaggcaactttcactttatattttatttttccatgtgtatgtatatgtgtccacatgtgtgggggtgcacatgtgtgcccatagagtccagaagttgacatcaaatgtctttctcagttgctctccaggtctctctctgaatcagagcccactgacttgatagtcttggcagccagcttgttccagggatcccctgtctctgagtgctgggatcccaggtggattaatagacctgtccagctttcatgacggtgctagagacccagactccatcctcacactcactttatctactgacctgtcttcccaacccctcctttgatttttaaaattgtttctgaagttggaaattctatgtttttagtacctactatgctggaataattatatgtcagcttgacacaagctaaggtcagtagagaggaggaaacctcaattgagtaaatgcttcaagatcaaactgcacacaagtctgtaaggccttttcttatgggacagggccatcccaagctggtggtcctgggttctataagaaagtggattaagtaagctgtgatgagcaagccagtatgcagcacccctcaatggcctctgcaacagctcttgctcccggcccctgccctgcttgagttcctgtcctgacttcctttgatgatgaacagtgttgtgaaagtataagcccccaaatctctttcctccccaagttgttgtggtcatagtgtttcatcgataagacacctactcgttctgaaacatgtctccaaggcttgaaattaacctactacttttaaatcaacatgacagggaaagctgaggccatagtttatttgaatggcaactttatcttcatgtgattgacgattacagatgacaaatgaaactcaaaatctaagttttaccatggtaccttttagtgacaaacatttttcttggttttaggttcattgctttctagtattgttaaactatatacatctctgggtttgtttgctccttcttggggtagcagacattttgaataattacttggcaaacttaaggtgctgggatgcattcttgcttagaacttagaggatgagaacgagagaggacatcattcttatccagtcggtgctgccgaggaggatgggagtagatgctcttgtctaaaatgaagccttgaagagaacagatgtttgtgggcaggactctggctccccagcaggggaaagaactgggtacttgtccacactttgctgctcttaagagttagcctggtactagcaagtccccctgttcctcttaaatacttagcttgcccatctgtaattccaggcccagctgaatgctctctagtgtctcttacagagaaaacatctcctattgttttctttgtgctatgccacgggttcacacactccaagtccctgcttgacagataatggtgtgtgaggaaatgatgcacagagcagccctgagaaacccaagtggattctgaccacactgatgtgctaatccccaaagaagacgaaaatacaaaatgggccagggattgaacatgaaaacggtgacagtgagaaaaacattgaagcagacagctgaaagcttcatttcctggcacgtctgccatgagaaacgccaagcctgccaaatccttcaggccgtcaaggccccaaaactttggctagctctcattttcagcttcccacaccacatgcccaaaccacacaggaaaattgtctctctcccttcgtacttgtgccttttggctacccgtctgtttatgccaagcccttgcctcacccccttccttccagctgtcactgtgtcccagctgctgctttctgggggcttcagggtgcagctgcagtcttcaggggaggcacaggctggtgaggatagtggcaggcgttggtggtgtgtaacagactctggaactgcagccatttctacccggtttctagctggtctgaacagtgctcttgctccttggcaaccgttagcactgatggctttaattttttcccttctccctccctcttagggagtttcccccccaccccctgcacattctttggcattatggtctgtgaacatcctgtggaagatttggtttgtcttattttcttttgccagactgttcatcatcctttcttcttccacgtaaaacatatttatctatttcgagactttaagaccgataaccagatctgctggcctctcacaagtttagaaatttcacccttctcagccttgacagtccatcccaagcctcatggcctcccaaggccctgcactctctaggacatttgttgcctgtccaaccccagctgctgtgggagcctttgacctctggcctgtgaggttcttctgtggagcgtgtacctcctattggctcttattgatgacctctaagcaaagaggcaccttcccctccttttagagaatccaggaatcaggaaatgtatcggaagagtcttgagtgaatatgcggagaagccgagtgtcacgaacgttttaaattgttctgctgtgcttggcctgtgtctgccagctcagtgtggaaggcaaaaccaaacagaagcctcacacagtcattgtctcccatagccaggcattgtcttttgttcaagaatagagcttttgcagggacaatggattgttcttctctgccaccctttctggaacctcagtgagccgctgtaccctgtacctgccaactccaacccactctggtttctaaggggaattccacaaagttttcagaatctcattcagtgaaaaacaaactcagagtatgtttgtacttgggtttctctaatgtttccttatatctgtgtgtattttgtattttacttaaatcgttaaaatattgcttgatgctcagttgaaacagactagtgtggttggtaaaatcttcacttatagatttcatttccttgtaatgtattctgtaatgtcttcttagtcattgggaatattggcccgtagcctctcttctttcatgtctgcctgtccagttggtttggctatattgtgtcttgcacccaattatactttctcttgtttatctttcccctcattctatagttttgcatggtgtgtaatgtgtggactcatagatgacagactattaagagctggaaggacttttagatcttagctatctgaactcatttcatggatgagaaaaaaaggaagcaaagaaacagaagagttgagttaagatcacacactcgaaacagcctacgcttgtgagcttcatggccatgctcaaaggcttcctctgctattccatcaggtctaatgtctcaggaagtttccaaagcactgataagagttcctccaaccgataggaggccatcctgtgggaaaggacacaggccttgaaaccagacagatttgggcttgaatatcgggtcctgccacctgctggcagggtgacttgggcaattaagacatgcttaaaggaattttgtttcttcctctgtattctaagagtattaaaaacattaatactttttgagcaacagtaactatgaaatgttataacctatataatatatctcttatacatattctgtttaacaaataattgtgagcatttgctgaccatttaaatgataacttgaagtaggtatcttattattaggcaatttgagcctcttttgctcggagatggttttctaattcagggttaaaatatgaatggagtaagttgtctggaaataaattcctgaaattatttatagcataactatgcatgcatttcctgttctttatggctttcatatggattcagctgtagtgcatcttgtccaaaaatttttgtacaagttaaactcaccccaagaagacatctgaagtatctttggttttgtcttctcctttttatttggctacacattagtttgtaaaggtagtatataatttgtgtaaaatatttcatccatacttttcataatttagagatgtagtatttttctgatatgtgtaggactgtgaaggctggacccagtgtaaaatcatctaggcctgtttggagtgtaagaagttataatttatcaaaaggcatccaagactgctctgttaaaaggaaacaggacataattattaagctttatagcagtactgataggggaggctgagttgcagaaacaaagctgtgaaatcagcagagaccaaaagcacaacaagaaagttttgaagcttcaggggatttcgtgtgaggacttctcagatcgcctggactatgtgtgggctgccaggattggacttgaggttcaagtagagggaggagccttgagaaactagacagaatgatcaagagctcagttagactcattttcagatcaaaatgaagagtgatatgctggacaacatggtgcatgcttttggtgccaagaactcaaggaggctgaggcaggaggatcatttttaagtaaaatacagatacctgtctagcttcctagctgccagtggactctgaagctcattgccttgattaggtaaagaaactgtagcctcccgagggttcaaataggagttttacttaggtgaaaatgccatgtagccacagagagcagtggatgttccttgtccctgtttgtccctcatgccataaagtacaagcacatgaagagcctctggctgtcagtatcttcaggataaaagcgggcatgatttttgaagggatattggataatcaaatatggctagaggtggaaggtcctacttggctgtatttttggttcattcagattcagaatcagaccagaggaatttggcaggcaccgacacttaccacttagaaccgcactcacatagttgtggtagcaaaagaatttctctaggagtcttagtctgcttgactaagccagaggtttctggccttaagtccagagttggtgaattttagaagaatcaacttagatctgtcaacccatgagactagttccatcaaatgagtggaagtgtgtctgcaattttcatagataagacttactctgagtaccgaggatactgttccccatgactgactcttccttaatctcatcgcctcccactgaggtgtgatatactctaatttaaaatgaaaatatcattaaaaaaaggtgaacttgaagaccctctacttgacatctgtatttttgaaattcttacttactaaccttggtatatctttccttctttcttttctctcctgttcccctcttctttctcttctgattctctcttatgggacagagtctcacagtgtacctctggctaacctagagctcactatgcacaacagactggtctcaaacttgctataatcctcctgcatctgccttccaggtgctaggattacaatgtgccattatactcagctaattgtcccaggtcataaggctttttgtcaagaagtgttcatgatcctaaacttggcctgtttgttttgttattccctgagcatttttacactctaaaaaagaaaatgacacctaccattatccttcgtcgccatcagtattatctattccttataatttgacagcattcctacggcatccagtggtactcagtctactagtttacatataataggttttttgacaagtacttttaatttaatgatgaaaaaagaaatagttttttgttttaaacaactattatagagcgagagacttacagctttatttaaaaattgaaaatataaatacaacattaacaatcaaagaagaggctatcaatttgagagtgagggggtgcatgggaaagattgagggaaggtgatatgggaatggatgaaggaaggaaaaagaaagaggaagtggtataattatattttaattaaaatatatttaaatagaaattgaacgtgggactagaacaggaaactcaagggaatctttattttatattaaacaatgatcctgggtcatcattgccatctaataagcagtacaaatagtacagttaataaaatgtagtaagttttggcgtgtgtatatgcactagatcatgatggtaatgaggataatgcatatgttcattatcctcaaaggtttctccatgttttccccatctgccacttcccccattcctcttcaagtaaatgactgacgtatttttgttagtataaattatatttcatcttcaagagttttgcatgaatgggatcatactgttcataaagttgtcggtatgatttttaattcagcttaattgtttagaggtttattcatgctgcttggatcagtgtttcatttcttttatagctaaataatatttcacggtatatgcataccacctgtgcctattgagtctcttgttgatgttcacttttagtatttgactatagattactaaatggagtaatgcttttactagaaatgatgagatcatagagtggatcttacgttcagcttcataaggaaatgccaagctaaccatttctcattctcagcagcagtgaaatgaacacagagccctgttgccccatatgcacaacatcacttgacaatggcatggcttatgttttagcccttctcataggtgtttaggttccactctggttttgtgggttttattacttttttacagtccagtcattaccctcttcaggtccaggtccaccctcccacagttctacctctcattcctccctgctctaagaggatgtccaccccgaccccttccccagtcctccccattccctggggcctcaaatctctctttctgtctgtctgtctctgtctctctttgtgtctctgtctctctctgtctctctctgtctttctgtctctctctctctgtctctctctctctgtctctgtctctctgtctctctgtctctctctctctctctctctctctctctctctctctctctctctctctctctctcttgggttatacatgtcttctctcactgaggccagaccagtcagtcctctgctgtatatgtgttgggggcctaggacaagctagtgtatgctgccaggttagtggctcagcatttgagagatctcaggggtccaggttagttgagactgctggtcttcctatgggaccaccctcctcctcaacttcttctagcctttctctaattcaaatgcagggggggccctaactgagtccactggttgggtgtaagtgtaagcttctgtctcagtcagctgcttgttagagctctcagaggaccaccatggtaggctcctgtctataagcacaccatagcatcagtaatagtgtcaggccttagagcctccccttgagatggatcccaagttgggcaggtcactgaaagctcctttccgcaagtttcttctccatttttgtccccggagttctttttgaccggaacaattctgggtcagagtttatgactgtgggatggcaagtctctccacttgatgctctgtttttctactaaaggtggactttacaagttccctctccccactgtagggcatttcatctaagattccccttttgagtcttgagagtctctcatgtcccaggtatctggtacattctagagggccctccacctcccacccaccttctgaggttgcatatttccattctttctgctgtccctcagggtttctctcctgttcccttcccaatacctggtcatgctcccactttcccttctctctcccctttcccctgcaccccaggtccctccctccatctgcctcttgtgattgctttcttttccctcccaagtgggacctaagtattctcacttgggcccttctgtttgttaaccttctggagttctgtggattgtatccttagtattctatacttttctgactaatatccacttagtagtgagtacataccatgcatgtctttttgtgtctgagtttcctcattcaggatgatattttctagttccatccatatgcctgcaaaattcatgatgtcttctttcttattgttgaatagtattccattgtgtaaatgaaccacattttctgtatcccttcttccgttgtgggacatctgggttgtttccatcttctggctatcacagatgatgctactatgaacatagtagagcacatgtccctgtggtatggtggagcatcttttgagtatatgttcaagagtggtatacctgggtcttcaggtagatctatttccaattttctgaggaagctccagattgatttccagagaagttgtacctgtttgcaatcccaccaacaatggaggagtgttcctctttctctacatcatcgacaacatgtgttgtcacctgagtttttgatcttagccattctgattggtgtaaggtagaatctcagggtcattttgatttgcatttccctgatcactaaggcctctgaacatttctttaagtgattctcgccatttgagatttctctgttgtgaattttgtttatagctctagaccccattttttgttttttgtttttgtttttgtttttgtttttgggggggattagcttcttgcattctttatatattttggatattagccttctgtcggatgtggggttagtgaagattttttcccaatctgtaggttgccgatttgtcctattgagtatgtcctttgccttannnnnnnnnnnnnnnnnnnnnnnnnnnnnnnnnnnnnnnnnnnnnnnnnnnnnnnnnnnnnnnnnnnnnnnnnnnnnnnnnnnnnnnnnnnnnnnnnnnnnnnnnnnnnnnnnnnnnnnnnnnnnnnnnnnnnnnnnnnnnnnnnnnnnnnnnnnnnnnnnnnnnnnnnnnnnnnnnnnnnnnnnnnnnnnnnnnnnnnnnnnnnnnnnnnnnnnnnnnnnnnnnnnnnnnnnnnnnnnnnnnnnnnnnnnnnnnnnnnnnnnnnnnnnnnnnnnnnnnnnnnnnnnnnnnnnnnnnnnnnnnnnnnnnnnnnnnnnnnnnnnnnnnnnnnnnnnnnnnnnnnnnnnnnnnnnnagggagggagagagagagagagagagagagagagagagagagagagagagagagagagagagagagagaaagaaagaaagaaattaaagactaactggaatttaatgaaaatgatgatacagcatatccaaacttttgggacacaatgaaagcagacttagaggaaaattcataacactaagagccctcataaagaaattggagagatcctactctaggagcttgacagcacacctgaaaactgtagaacaaaaatattcaaaccccaggaggagtagatgacaggaaatagtcaaactcagggccgaaatcgaccaaatagaaacaaagaacaatacaaagaatcgacaaacccaaaagctgattctttgaaaaaaatcaagatagataaacccctagccagactaactacagggcaccgaggcagtatccaaattacaaaatcagaaatgaaaagggagacataacaacagaatgcaaggaaattcaaaaaaatcatcagatcctacttcaaaatcccgtactcaacagaactggcttcacttcattttaactttcagttttctagtatggtatatttattaatatatattatatttaatagcatgtattaacaaatttctgctagtaggaatggcaattgaactcactaactcaaggccttttacattatatgaaagtagaaggaaagaaaggaaagaaagaaagaaagaaagaaagaaagaaagaaagaaagaaagagagagagaaagagagagagagataaggaagttctttaccatggggctatatcccccacttttgtttttatttctgagttttaatcttcagtgtattttgtgtataaatccaatatcatatataagttttgaaaacaatttcttctaatctttgaattatctgttcttcattttaacattagctttttatatgggggggggggtgatggggtaggccagaatatagagttggagctccccaaaagctggagttacaggaagttgtgagccacctgatttggatttttgagaaatgaacttgagtcctctggtcgagcagaaggtactcttaaccatcaaggcatctctccagctcaagaagtatttttttttagtaagattctatctatcatttattttcatggattgtgttttagtgttctatcaaaagactcagtgctgagcccaagttgcccatgtgcttcatttgctgttgtcttagctctttccctgtggtgatgaaatactcaaacattaagggagaagagggttatggtttgagtttaccagtccatcaggatgagaattcacaatggctggagcttgcaagcagctggcaacgttccaccctgagttgggaagcagagccgtgagtggttgcgctcagttcacactgtgctttttatacagcccaggattccaatccagagaatggtgctacctgccatgagtggccatcccacctcagctaacttaaacgtaattatatatgagttataaatcctactctacgcttttgcttgggcagtctgttgctgttaaaatatatttaagtaataaaagtatatagttgtccaaagttaccatttccagtatattccatccctttgcgtatacctgtatttttttactaacttgctgaatcataggcatttaacagaaagatttcctccctcctcctcctttccctccctccctccattcttccctcatctttcttgtactaggcagaattgtgtacctctgaggtatatcccttgcccgttgtctatatttttattttgagttgatctaagttgtatttgctggccttagactcagtctgtatcctaggttggccttgaacttgtggtcctgctgcctcagtttccctagtagctggcatgataggcaggcgtcactagacctacaacatcaggcctggattatctgttagtttagcttcgctcactgatgatgtcttaaagagtttatttcactttaaaaaatattctcattaattccttgagaatttcataaaatgattttggtcatattcaccttcttctctcaactcctgccagagctaccctctctgccttcacctacctgcccacccaactttgaattctcctcttttatttattgtttaaatccacagagttcattttatgtccctgaactactctttggagtgtagcttgccccatcattaaagaaaaccaacttttcctctctcagaagctatcaacctttgcttttaaaagatttcttttgttgaatgtacaactttgggtgaattttattgttcttccacatcttcagatcatattttagacagcccttcttttttgtctgtttttgtgagtgcaagatgttatgtgcctgcatgtgtgtgtgtgtgtacaaatatatgtgtacacatatatatttgttttgatgccagaaatgattaaaacacacatgtaatcccaacacttgggaggtagttgtcagaggatccagcgttcaaggtcagtctcagctatatagtgagtacaaggcctacctgaacaatatgtatcaaaacaacaatatgagttgggctttttttgagatttacttatttattttatttatatgagtacactgtaactgtcttcagaagagggcaccagatcctataacagatgaatgtgagccaccaccatgaggttgctgggaattgaactcaggacctttggagcaatagtcttcttaaccacttagtcagaagcaaactttccatagggctcctccttaggatttcagaggtagtatagaaatgaccatagcaaaacagaagagtcagtgacagaagcttcatattttatcttaaattgacaattagaaagtgaattaatttcagaattacaataatatgtacttcttctcccacacacccttcaaacatttagataacagatttgcttgtacaccactgaccacactaatgaaatgtgcttaagctactagaatgggaaggatcatgggctgtgttacagaagaagaaatgattaaaggaccagtgttggtgtcatagttcagagttcatgaccttcaaacagtaaatggctctgagatgtttggttttgttcatttcgttttgttattttgggttttctttgagaaaacaaatgggttttggagggacacattaaaagaggggcagaaaaaataaagtaatgctaattatctttttcttgttcttacatccccttgtaatgtcagctgaaccagtgtctgtaaaatccaaccttttatctctttataaatagtttcaaaagcagacacatttgtaagtagcagtgactagttgcaaagtataaacccagattttttgcagtttgcaagtgtgagtttgggtttgactaagtcctcagctcagagccatctaaacttgattagtaatgcaggaaggtttggattttactgtgcccacttatgtgactaattagcactctgtgttttagaagccagcgaagtaagaacaagatgcatgggagagtccttttcctgtcatgtgctgcttaaaagagggacatggagtgttgaagtgcagtgaacagttaagcagactttcacattaagcccttaacaagctctgtactcccagcactgctctgttgtggagagagagaatgctggtcaattgatttgtttgcttctacacaatttcctgtctcatcacattttttgtgaaccacatgtttgagaccgatgctgctgatggagcccttacagagtataagaaagaggttcacctccaccaggaaaaccttgtgcatttcaattttttttttaaattccagatcattttactggtagttctctctgcttttgtgtggaaagttgcacggcctttaggaagagccttctttcaagtaggagagccttgaagacactgtctccagcgtatatgatgcccatggtagcttatgtggccctgcttgggttttagcatttgtcagttaagatgcacatgcagtgctctcagaggcttgagtatttttcttttttttcttttttttttttttgagtatttttcttaatggaggctctatggtaaatcatagttaattttcattctaataggtcgttatctactatgtgaagtttattcatgaagtatttggggaagcatgtgttcaagctacaatgaattataaaatttccttattgataatagtgcatgcccccaagtttctagacagtttcaaaaatagaaactttggtaacatttttttttccttcagaagtgttttgtagctctttttgtgtgtgtgtgtgaaagtttaaaccctcagcagtaagagttcccaagctgacttcataacctctcttcaattcaaaggggtattagagtctgaggaagacttactttgggtactgctgttgggatggtggggaacaacagaaccatcagcagctaaaaatgaaatatacaagtatttagaacccgttctaggctagcactccatacatggctgtgctgaacctccgaacatggcccgaaggattggttacctggaattcagagaactagaaaacctacttttcttctgaatttcgtttttttaaaaccatatttataaacaattactacatgttagtccttcatcttctttgatgtcttgattattttaacaaatttttacacaataagtggcattgtgaaaaaatgaaaatcctacatagaagtctaatagtaacagttactgagctaggtaatctgagggtttcagaactgaaggaaggctcagatacctttcagaccacatttgtaatttgatagatgaaaaggctgctgttctaaagtgtctcagcctcgcccagaagaactaacaagtgcagaattaagaaaaggctgtctgcatacttctaccatggaaatgctggggcccagaaacattttgaattttagacttctttggattgtggaatatttgcatctatgggtttatatagcatgggaatgggaagcaaatctaaatgtgcaacttactgtgttccatgcgtatctccttcacgtggcctggacataatttcatatcatacctgtagcatgcctgccagcctgtcacatgaggtcaggtgtaacattttccatttgtggtctcatcctggccgtcaaagggtctcaggttttggattttagcattatggaagctgaccctatagattttagttccaatttctgttgtattttagaaatagcactttacagatcctccatatcctaaaagtaatgatgttggtaaccattaattttaaaatatgacaagcctattagttttgttgtttttttttttaaagaaaaaaatgttaatttatgtttggtttttcagaaaaccacagtacccctttccagattggagagaatttcctggagaaggctccctttgatatactgttgaccatttgtttgaggctacaatgggctgtgatttctcagtgatggtcctggaagacggtgctcaacctgagaccatagaagaaaaattgttctgcttctggcatattccatgagatgactaatagatagctttcagggagactagttcatgacagacttcccaccacaccctttgcacagcgtccccccacccccctcctactcaatcccaacgtgccttgactaaactcagtgaacaagaccattgtacgactcggaaggaaaatgtctaaagtatagaaagttctaatgacttggtagatgccgtaaggactttctgagctggaagctgaatcacttgtgcctctggctttatggagtatgcccaggtggtgtaattcttcagtgtaacactgaggtaatttttgcatcagtcaaggaaatggtttaagtttcaagcgtatgaaagggcaagctataattgttcaattccagtgaagcacgggtgtgtttcattttctccctttatttcttgctgtcttctttaggtaagacaagccaaggaaggagtgtgctcatatgaatctgcaagtgagctttaaagtcagtgaatgcgtttgaacgcctgcatgttatataacacgcttctcttgtaaatgttggacactccttagagcgtgtctctctcacttagagaagagagttgctttcacatagtgacagacggtgtgtaatgatgatacagtggagagaagcagaaagtaaggatttatttttgccctcattgttgattttcatgtgatatgagttgaataatttacttcatctcctgtatctgctgaggtgagtggtaatattttcagtggccacacagaggtgctgggagaatgaaaaataaattttcccaaaactcattatgttgcctggaagatagacgtatttaacaagcagtcgatttcatttcccatcttgttttatagcagtcacctatcacgtaatcagaagagccttcacattcgtgatcatttttcacaatgtcatgtgtagaggttagaataattgcttgtgtcttcaaatatggaaactaaagctcccagaatatttgctcgatttgcgtttgaacaccccagttgctgcagttagatggcctcatattgactgtgagttgggagctgttgaaaccagctttaatgtatggacagccacttcctctgtcatatgcactttgtctatgcttgacattttacatgtaaatatttacttttttttttaaaaagcagttcccgttttcattatgaattttgtttaaaaattgctgagctcactaatctccttactttttaaaattcagcaagaagtttgataaaagtttataagcatggagccagaacacaagttttaattttttttattcagtgttcctagtttccagtgctatgacatggctgctctttagcacttttgaccccagacgtcgtgttaggaattgcttttgttttttcctcactcttgctcccgcttatcaccctgtcatgtggttgttgactttagattttcattttcctatctggaaattataagcagttatttattaacccgattactttatgcttcaatggacttgtcagtgggtggccttgtgaattatttcagcttttagagatacagatcaaccgcgccaccctatacacacaacacaaagctgccgactccgctattgtaggacttgtcattgagtggcatttgaaacttgtaagagcactccctctgctttttttttttttttttttttgccttttttttttgaataatacttaacatgggttttattttcttagtagacttgaatagttgaaacttgtcatttcataagctcttggatagcacaaatgttgaacaggaattacagcattcttggtgcgatttagttctagtcatcaaaagcaatcaattttacagtagaattgtaaaacttcagagctaggtgtaactaataaccaggtataggcctctcagtttatttaagaaaaatctgaagatcaaaaagactaggtaatttgttactgctccattctttaggactggtgaagttgggacttgaacccgggattcttcacttgtagctcagagttcttaattaggctacatctcccatgcctctgaatctttggctccacttttgaacagcagatgatgtctctactttgtacaacttagaaatatgattgtttttgctattccttgccaagctatattggagcctgagtcaaaatgaaaggctagctatattgactttgtctttatcatggacttttagcatttttaaattgtattaaataattatcttaatcagtaaatccttcactcacgtcctagttctattactttactttaatttaccaactataaacccctcttttcagccttctgaaataaatatggccatttgggggatattttctagttaattaggaagttgaagccagttgggagttctgttattctctttcactgtatggtgctttgagcccttatataatgtgtgtgtgtgtgtgtgtgtgtgtgtgatttatatggattagcaattgaagaatgttctttatagccctattgctttcattgctgtgcttggttctctcaacaaatgtttgacataggtattgggtacatttttcccccctaaataatcaagtctaaatctcacagacttaaagtgaaagaattaagtcactgatcactgctgatgtgtctggggacagacctgacttgcaacattagcatcatttcttcaggttctacttcttttcctaccttgaagcgccaagcttaaaactctcctataccagctgggcaggaggagatcctcccctgagtgctccagcatgaggttgcagagttgagtaaccgaccctctgtaactccaatgccatccctgagccagactgtgaggctgcaagatgcacttacatcactgttcaaatatgctgcctgtgctctagcttggggcagagtcttaagaccagaacagaggagatgtaactcttctaaaggaagaaaggataccagaagccccttccaaaggaagtcctaaagctggtcctggtggtcctggtctgtaatcgtagatattggggaggctgagctagaagtatatctttgtttaaatccaacctgggctacagagtccaaggccagtctggacaacttaaagaggctgtacctcaaagtgaaaatttaaaaagaaggatagagcgtagacagctttgcctggtgtaatggctggttttaattatcaccttggcacaggtaaaattccctgggaaagactctccatcaggttggcctgtggacatctccttggggggcttgtcttgattacattagttcatgagggaaccccaaattaaaagtaggtggtaccataacctggggtttggtgtttaattctatagagaaagtaaagctgagaaataaacctgtatgcattcatttctctttgctgttaactgtggatgtgatgtgaccaatgttttaagttcttaccaccctggcttcctactatggtgggtggtggcttaaattgtgagttaaaataaaccctttctcccctgagacgctcctcgtcaggtatttcatctcagcttcagaaatgaaactagcatgtataagaccctcatgccaattcccagtaatgcacatagtttaggggatggtattctaggctggcaaagagaaatgcatactagaatgtgattaatcccttcttcttcttctgtgaagttgggggcttcgtaaattaacttccataaggccacaatgacagtgagtgatagaccgtgagtttcacatcatatctgactacacatcaggcctttctcttttcccaatgctttgctgtatctaaagacatttgaaatggtgaggatcgccattctttctagcatggcttttcaagggaatggttttgccctagaggacatttggtaatatttggagatgatttgggttgtggaaagcatgtgtggaggtggcaggcatgctggtgggtccacgccagagatgcttctaacatcctgcagtgcacaggtcgggtcctcccaagaaaacttttacacagcctgcaatgatcacagtgccaagggtaagaaacaaaccctgctttcctaggttctagttctagactaattgccattaacctaaattctagaaaatgaattaatattgatcaggattgaaataattttaacaactcagtaaaattagccatataaatcaattttctttaattcctatagctttatgtcaattcttgtttaacaagtaaatttaaatagagcacacattactttaaaaaattaattcatacatgttagctaactactcagaaataattttaaaaaataagccatataatttttcatcaaaatacaaatctaaagctcagatgtggtggaccaagcctatgctctcagcatttaggagacaggagaattattgttaattagagtaaattcaataccagtctgggctatagcatgagaggaatgagatttttgtcttaatgtggtaagacaggtaatattctacacctgggggtggggtgtggggtggaaattagtaattattttaaaaactcttgaccaaagcatattttttttcaaatttagataacaataaagggttttagtatgctagacaatggtcagagcatttcttgctaccagccagggctttgtgatgtccctgtgactctgtgagctaaaagtggccatgtgaaagcaggtgtggaagaacggtggggacccagtgaatgtcatgcactctcgcagttcagctcttcagaaaatcaacctctgtggaggaattttaatttacagcactgctgctctggcaagacaccacaaccaaagacctagatctgtatgatctggctggaatatagacatgcctttcatcacaggagacacaggcaaagcgccagcctggtatacatacagcaagtttcaggtaggtccaggggtggggatacatacctttaatctcagcactcagttctggtcagtcagctcatggaattcagaggtagtttaactgagagagcttttcagagacagtatgaagagagaacaaactagtcacaggcaagacagaacgagccagagaatgagaaggagccagaagattagaacagattgccagagttagtttgaggccaagaagggcaattcagagagaagtctgaatcggtcagtttggagaggagtttgaaccagaacagctgagttgagccagccagccagagttcagaaagagctagaaaggctgagcttattcagtagttaagtctcagaggctaaaaacatcctaggcccagataagattgcacagaggctagatgcttccacgactaggcctaggttagccaatggagactgtaagtcttcaggggacaattacatcaggagaataaaagctacttttacccaacctttcttagtgacatgaaaatagttgaaaccatttgcctccttgattcttgagttgagaagatagatctgaatgaaacccaggaggggcatctgtagtcaaaccgcagctagttttccagtaaatagttgaagtgataccacagatggattcgcataagaaaatttccacaatccagtaactcaaagttattgttggagttcaattggagggttagcattttctatttctgccagttttgaacaaataatctcttagtgctacattctaaaccctcatggctgctcctgcttagaattattaatgtattccgtttggcttcttttttgtccctgttgggccctgtccagagcaactaacattctctccgattttgtccagtaattccttcttgccttgctagttcacgtggttgagcctccacccacttctcctcgccccttgatagtcccctgccacccccatggtgtggcctcactgcctcacctgactgtactgcctaatcccagaatgctcgttgttttttctgtttcttctgtttttctttggcctcccgtctctcctcagtattaaattcccttcttgcctattattcctaccttcttctgtttcccaacccctaattactggctccatatccttagacttcccagcttcttagttcatgtcctcatctcctaaggtatctgatgtccacccacctagtgtgtgttagaaggcttgtgtgtttggagagaccgtctattcattgttaatagaatccaatttgcagtttccttagaaacagggcagctgctgatcttcagattacccacggttttcatgcacactcttttgtcgcgttaggagcaacatttatctgtaaaacatgtcagaaatatactttaataaaaggtgtaagttagaatggcaccatttattattgagagaagcttactatttcctttgagaaaaaggtcttgaagagctggcatttttaaaaagttttttttttaatttaatttcttttagttatttactttacatcccgctcactgccccactcccagtcactctcaccccaccccacccccacacacaatccccctctcctctgagcaggtgccgcccctgggtagccccccaaccctggcacttcaagtctctgtgagactaggtcctttctctcccatagaggccagacaaggcagccagaagaagatattccacatacaggtaacagcttttgggatagtccccagtccaattgttcaggacccacataatggtcaagctgcacaccggctacatatgtgcgggacggcctgggtcccacccactggacagccagtgtatgctctttttgtggtggttcagagaagagctggcattttaatttctgatttaccaacattttcctggcactgtcagaagtcactccttagtccaacgttgcagtatagcttttacagagcatagatatgagagccacttgacaacaagtgacttgtttaggatttcacagcaagctaattgcagaggccctgggtttcctgcctcttgatccctgttgcatgaatataaaagcacatattatgtattgcttatttatatgaatgccccagagcatttcctttgctttaatgaaattgtgaaaattattgcccagtaagggaattgttacaatagaaaacaaataaagtgggcatgaggttcctagtttattattgttttccgtctgaccaatgaaggcagctgtgggttcctgggcttcttgaaccttgagcactatattcatgttattctacacaatgaagttccctgaagtccttgaaaaaccacaaaaacaaaatttaaagtacaaaatgttactattgattaactcagactgactcttgtttgtttacaaagttcccaggcctccatggggcagggaattccctgtggtgagttagtaagcatccctgtgggagccagcatggcttggtgatatgttttggatttctgaaaatgtctttctgttgggttgaggaggggaaacagcttgtggaactgctctgggtactgccagcggactgcttgggaatgaagagtgcattccagtagtacgttagggggaggttagctggtcaggaaatataacccttaccaaaggtaatggctcccactagcattttcagtaaggagtaccagatgtgagtagttaattattctcagagctgataagtacctgccagccaaggctaattttattttcagtaaacagtggccaaaggtcctagctgttcatttgataggatagggcctgtttgcacttatctattaataaatgcacaacactcctttcgttttcctttcccagggccagataaaacatttcagacactcaaagtatttgtctcagtaaatcagacaaaagtagacaaatctggtgattaacttggtaaacagagagtggttaagtgttacctttggtgtttaacccaatgccaaataaataatattaatcacatggcattttcaataacctttatgaagtaagacagagaggattttccaccccttttttttttttaaccaccaggggtataagtgtatctcttaagtgctttcagatgtcattttgtagggagattgtgaaagtcagtttaagatgagatttattcttatgtaccatgagtaactcattgggaatgttgtatcagtgagcactgtgtggaaacctggaaagctctatggttcatcccagaaggaagactggcggttcctacgtagagataatagccttctaaaggtttcatttggatggagtccttttataccagtaagaggggtaacagaaattcattcctgcctagattttcatctttgaggcaaaggattccgttaagtattgaactgtttattttgtgatgtccatgcttgtcctgtgagaactagtgacaagtgcagtgcttacttggtactgggtaacatagcacttttacatcaaagaattttcaatcactccaagcctagactagattttcctggtgacccagtactgctatttccagttaccatttctatcattaaaccttcctctttattttagtcaaaatctgcatgctctaccaaatttagtgtcttttttgcattggctttgtatttgcaagtagcttatgaaattctttttagtttcccatgatatgtaataatcctagtttactaaacattgaacattttaaaaaaaatagctggcatgccttagaggaaaaaatgccttatctgcacgtcttcatttagaataatttctatgttaatatcttattccataagagtgttctggcacagggccatgactatagtgcctggtacccagtggtaatatcacaggagtgatggttgatactaacagtgtggaggagacagtgcaaacccagagttagagatgtgtgttatgttgtccagttcctttaatgacctgctgggaggctgggtgcatttcttgcactcttttttatgttttctcttgaatgggaatcaccaccctccctctcaccatagactctcagtggctgtactttgaccaccttaatgtttgtgtccctcctgtccgttcatgttaggactttcatcagcctgtgtgccagtcttcctgccacccgtcttattccattgctatccctgtgttgagttcagattcttttttcccaatcgcacatgtgctgtcttgacttaaggcctctggtggctcctggtgagctctgagatgaagttacactcgctttggctattgggattctaaggattttcaccttgtgttgtcctcacctcttcttggagcctttgttgttgcccctaaaccctgctttctttctacatgcttctttgcttgaaaacacttatttaataataataataataataataatatatgtatgtgtgtgtgtgtgtgtgtatatatatatatatatacatatatatatatatatcaccatgaaatcttttgtgactcaagtgagattggttactgcctctttgattcccatcctgcagtgtgcgtccttctcagttactgtaaagccactgtatttgcatttgtcttcctctccctaatccgttgcctgagggagtatatcttgtacagttttgcatttccgtgtttggatcagtggttgatgcagggatcggaggaggttgtagcatttgcagtgtgacttcccgctcagatatacttcctttccagtgttggattgaaatggcttaaggagaattcagattaggaattgatgagataggtagactagatagatctttacttaattgatgtgattggagggccagtaggaaggtttctagtccccatacccacccatagatttcatagtttgttttgtggtgaaacttccaagtctctgtgtcagcatgtcattgtcatctctttgttagagaacttcctaattttcagtggctcagaaacaactgattgccaaagtttggggagttggggagagcaaaggactggtatgtgaggatgtgttctctcccacaaatataaggttcactttggctgtcgttctgttccgttcagattcggtccctttctgagcccaaacttctgctctatctgctgtctttgagtttacaacttctttatatccatttttccagaagccaaatagttaagattatgtgggacaacacaaccacacttgtgaggtgtacataggacttgaacctaaggagatgagaaagtctttctgcaaaaggaattatacaaagatagaaagctggtgagaaaaagaaggataacaagataaagaggaaattacaagtagccaggttcccttagagtgaagcaaaccagagtcagtgttgaaggaaaaggaaagctagaaacaggacctggaacttcaaagacaaaacaagccttgagttccccacccccagaggtgttaaagtgccaaggcacacatactcctccactaaaagttgcttgacagactctaagtgcctgggtcaccaatgggccttaaagggtgaggagatctgaggtgctatgactttgacattgtgcagtgttttgcagttgaagtcttgaaagaaaggagatgtcatgtgtatataatgcaagcttacagattctaagactagtctctgaagcttggtttgcctgttaatttgtacacaccctcaaatgagctggtttcctaagaatgtgagagctctcaagtgcgggctgtgattttagtcactagatgttatttagagcacaaatgtcatcactaacatgggccagccattgtggtacagaagcagagacccttgaccactttctacctgcaactttcttacatttaatagaaactcttctctattgggattttattccatctaatagggaacaaaataggaggcagaacttttgtttactacccagcatgccgctcagcggtgcagaagctggctgtgctttcaatgacgatatgaataatgatttagaagtttgttttttggggtttttgtttttgtttttgttcttttgttttgttttgttttgttttgttttttgtggctcccaccccttgcaaacactcccagggctaagcacttttctcctttctcagacggggaggaacagtatttgaattgatctcagatacaaatttctctccttcagactgtttgcccgagccttagaaatgtggcctgattacataagcactctggaatgtagattaaacagcattcaatttgaaaatctaatcacctcatctaaatatcattaagttataatgggctgattgatagagaccaaagccgtcttagcctggtgtgcatgcctttcactcagccagccttttcaaaccaagatgttgataaaggggtctataaatcttagtagttggagacagtttaaaagcatagttcactgggtaaggtcacacccacttaagtgacctattttgtatacttttcaaaaataggttaattaacttaatagaaataataggtctctggtattgatgtgcaattactacaaaaacagggttgttggtttttttttttttttttctttctttctttctttctttttcctttccgagcaaacacgatgttcatgaaattgagggcataatcgctatgacagaaaccaggtttagcaaggcgagctgtgttcagcaaatacatttcagacttgccctttaaaatctacctttattccaggtcctaggacatgggctcctgtctcctggagcattctgttcctggcactctcctattacagcttttaggagggattactttagctgttgctgctttcctaatcgctgtactgcagtttatttagctcttggccctggagcctcagcaggcatagagtgcaacaaatgctggcctcttttctttttaaatcaagggcattttctttatggttccaacacatggttcatgtgctagtgtagtttcagggaaggatacagtggaaagggcgaaggatgcccgggcgagagtcttattgggacaggctgcagcttcctaatgcatccggctttattttgatgctatttttgtttttattgttattatttggaactcaagccattctcccaaaatattttatactttgcttaggtagggctgttataacctttcttttctttccctttttaaatttattttatgtttatgagtatgctgtggctgtctccagacacaccagaagagggcatcagatcccattacagaaggttgtgagccaccatatagttgctaggaattgaactcaggacctctggaagagcagctagtgctcttaaccgctgagccatctctctagccccacaagctttgttttctattactggctactaaaattgtgtcatttgaatatgttttgtgtcttatgtaaaggggtgtttattatattattctgtagaacctttaagtacatttaaattagaatttcatgtttagaaatgctaactcccagccattgacagttgcaaaaccccgtagtctttaacagggagactgtttcagaaaagatgaaaggaggaatggtgggctagataaaaagaaagaaaagaaaaaatatctctccttctctcggtctgatactgtgtatcacacacagttctctaaatacatgttgctaggtccctgacggtgctgcggcctagggagcaacagtgatactcattcatgtgagactcttacaatgtagttgagacaggtacattttgaattggtggatttatttttaacagattggagtattttgcagtagaaactgttggactccttggtcatcttacagcaatgccacagcttgcttgtgcctcctaccagcccaatcttttcttttcaagaaataacacacttttatttattctttaaccaaatgtatacaagcacacaatgtacttctactccttcccataactcctctacgatacacttccattcccccatgtatcctctttttaaaaaaataactcaccaagtccaatttggactgcccagttactcttgtgtgtggagtcatccactggggtatggttgatctatcaggagtcacaggagaaactgaatatctacttccggaaaccataaacttgggtagctcctcaattagaggtcgggagctcaacatgctcctcccacttcatgctaggatgttgattggcttggtctgctgctggtcttgtgaccatagctgttgtgagttcatgagtacgggtccggccatgtccagaagagactatttcactgtatcctctcagatcttgcagtctttctgcctctcttgtgtggtggtctcaagtctcggggagaggctatgatgtctctgtgtggttgagcactcctctggtgtttattctcttcacgttacctgtgagtttctgtgttggccactttccattgcatgaaggagcttctctgatgagggctgataactgagaacaaatgtagggagcaatttgatatgatgctcatctggcaaagtaatagttgtcagttcagccctgaggttcatgctccccaaccaggagtcctgtggccagattacagtaccagggatgcattccttcctgtactgtggaccttaaatccaatcagaatgtggttggtcacctccataacatgcatgccactctagtatccattcatgggcataacttgtcaggcctgctgttattgtagctcacagagttaagagctgggggaaactgttggtggcttttctcccccattagcctgtataacacctagtgctagagcccaacacttgttaaatgaaacaaatcttatttgtatatgtgtgtatataaatgtatgtttgcaaaaaaaaatcagagagtatactgttctatagaatcttagctgtaatggaagagcctttaaaatctcccttccttggttggttctttattgggagacaggaagaatcctttttaactggactgtagtgatgtcttgatgcagcacaggcaggtaagacttggtttcatgttggacgatagaatggttcactcttcagtaccagggattggaattagaaaggaccaattcaactagaatttactctgctcttttattcctctgtctgtgaggtgggcttcccttgaaagcatcctccctccccttgactttagcagcatcccttgtttgaaagcaaagaccttgtttcctgttctgtttttttgtttttgtatcctctaatttgcctagtatagggtccagttcagagcaaacactcattaagaacattttagttaattaactacaaagtatctggcttgagctggggagagaatgacaattagaggaagtactggcacacagggatattttccctattagtaattttttcctaatactgatagtactatctgttccttatagaaagtgcggaagaacaaaagtttaaaataaaatcacatatccacttcttggatagccctaggatacctgaataagttgtacagaaatgttgatagcattattcagaatgctgaaaaatgttgaaacaacctaaatgttcatcaatgatgaataaatcaacaaaatatggcacacacatacaatgtcatgttgttcaacaaagaaagaaatgaattatgggtacatggtataatatggatgcaccttgaaagcaaaatgcagaagtttatatgatgtcaaggaaatctgtcgagcaaaactggggttggtggttgcttcatactgggggaaagtgatctatgtgcaataactagaacacataatctctctctctctctctctctctctctctctctctctcgtgtgttttccctcctttccccatttcctcctctctctcccttccctagctttagggctcaaacctagggcttcttcctgcatgataagtacgggttccattcctgactatacttgcaaccctgtaattcttagagacatgatgaagctgtttgtagtagacagtggtaatgattgcacagctctgtgaataacggtaaaactgttgaaatgctttcagtgggtaaattgtttggaaggtgaatggtatctcaatgaagctgccctaaaattttaccaccgaaagccccaccctgaaatcactactgttgaaagcatctgttgtatttctttctagaaatattttatacaaattaaacattttacccagtttagctcatatttcacatgtagtttttagattttatttatttttattggtatgaacattttacttagtgtgtgtgcgtgtgtgtgtgtgtgtgtgtgtgtgtgtgtgtgtgtgtaccacatgcatacagtacttgtggaagcagagaagaacatccgattccgctggactggtgctaaatctggttgcgagccacagtttgggagctgggtcaggaacctggctcccctggaagagcagccagtgctcttaaccactgagccttctcttcagcccttcacatataatttttaaatagtgtttttacacttaccattttatcatgaacattttctcgttctagtggaacctctcttgtaaacagtcttgtacagggaacagcataattcatctcacagttttaacataatttctatcaccgttctaagtgctgggccctgagaatgaatctatctgtctatcacagttgtaaacagcaagttgcagtttgaaaaagcttatgaaacttttgtcttctcatttttgagcacacaagcctgatgtaaacgaagcaaagaaagtgtatggggagtggtggtgttgtggaattttacaccagggtttcgggaaatagaaacttgaacttggggcagaaaaagagagacttttcatctggtgagacccctggaacaaaagcccctgggcagggcacccaggctccacctccacccacgagtgcagaagtcttggcttcctgtgtgaacagggctctgacaggttctcagcctgacagccccggatgcgtacatgaggttttctttctctggaagaggttttgagttattgatctgtcactttctcttattttgtaagagcaaggacaggatgggaaggaaattaggtatttctgcagttaaatcttccttgatgtgagaagaaggttcaggactatacaagttttcactagaaactttattttattttattttttgaagaaaatactaaatactttggtatagacatgaattactgtccatcttatgtactatgttttacattagtaatttaggctgatagaaatcttaaaagctcaacactttgtcatagcccctcacatgtgtgcattcactagccagcatttctactgttcctctcccctcttgcttttctcttttccttccttccttccttccttccttccttccttccttccttccttccttccttccttcttccttccttccttccttccttccctctttccctccctccctctctcctttccttcctttttttccttcctttttccttccttccttccttccttccttccttccttccttccttcctttccccctgcttacatgctaggcagtcactcaactgtcagcttgctttcactgagttctgttaggtcttcggttgaacagcaccttcttaaatttcactttgtcccttccctctcctctgcaagcagagttctcacttagcaaaggttgggaaatgcattgtcagttgccgagaggagaacggcccatggttcctagtttttctgtccttaacattcttaatcaactacaaatgtgtttgtccagttcctcttggctcaaatgatgatcactttgagaaatataaatatattcaggaaaggagagctggggtttgtctctttattagtcagtgcccagttcacaattgctgttttttaactttggagaataagaagcttaaccagatgaaaagacaacgtaactgtttgcaaacagctaagaccaggacttagaggcttgcgaaagcatccctaccaaatccagaagcttgtgggagctcattcatccgctatataaggaattacataggcagaaatcataataatcaaatctccatacaagccactacactggcctaccaccccaattttgtttaaagcaagactcttaaagagacaacataagggatggaagtgaagagcaggcttctcgctcattgcatcatttccttttagccacggatggcgctttgtgcttggctgcgttcacttccaactcgtcaagcctatgttatgaaagagaaataagacacttaatcctaggaatgattaacctgcattggctgccctccctagtagcttgcccttcctttattgtagcctgtttactcactcctgagccagatctccaaccactcttatgattgagcccagggacacctgggtcacaagaagttagccctttgttttagcctaaggggcgctccaggcacctttctgttctgtcttattttactatttattcttttattttggaggcaggctctcattacatagctcaagcgggtctcagttcattactctgtagcccttgctggtcttcaactgtcttcccttggcctcctaagtactaggatcacacccagctttgaacttttcaaaagcatttttaagttcactggttacaaaatcccagtcaacaaaagatcattattttaaatttcgcatacaaggaagtcaaacttaaggaaatttcccatgccaaaaactccacagcagaattcaaatggatgtacactcttacatatttatctaagagtctaattcagagaaggatagtgttagttctcatttgcatggtaaactaggggtgactggagccatttgtaattaatacattttttaaaatcttttgccactgaagactctgtgatgacgaactaggattacactgttgtactccacaaaaagatgattgtcatcttgttattcggccttggggattccctggctctagaacccaaggtttattttccctaatatcagtctttgagtgtagtgacacctaactgggactttacctttatgctgaatattttgcctagaaaatcctaatcagtatttcagagatgacaagatcagggtgattcttagatctaagtaccttccgtgggatgagagtcacatgagataggagtagttttgttttgtattgatccataggcataagtagtgtttgctcttcagtagaagggactcggataggactcagctttctcatcatatggaagagcagtagcagaaaacgagatgctattcacatttgctggcttctctcctcaagcagtagactgcccagattaaatatttactcaagaaagagcatagtgttggaagagcagagccttcaaatggtgaaaatacacaaatcactcctacataagcctttttatattgacatctgtggccacagattggttggtaagggggaacttatagtcgctgaaacttcttcaggcactagaaacatgttctgcagggcatctttgtaattatgccccagtctcaaattatcccaccatggcctttctagtttcatgttgactgtatattattagtggttgcctactaattcctgcttttcctttcttcttagtgaccttcatgttcccatttattgttcttttgtatattctacttctattctgcatgtctagagtatgaaggaagtgccggagaattttactttctggtggatttcagagtccattatgaatgatgcatgaaagtggttgtaagaatagtgggagtacaaacaatatcattttgactaagataaggacatggtcttgatagacctcagtgtctccagactaatataagagcaacttaggtgtagtgcctaaagccctttagtgaacataattttaaaatgggatggccatagtgtaagttatactgaacaatgctggagtgaagccaacagcatgtggataggactatccattggggccaagaccaaggggagtttggttggatcaagattaataactaaaatgctcttctcctgatatgcacatgactagctccctcacccacttcaagcttctgctcaaatgttaccttctccaatgaagcctgaaaacctattctgatccacctatttaaactcagaataagttgaaagaactaattgaaacctcatgctgattaatcctcttttcaaggccctgagctgcatttcacaagaatatttaacattatagccagtgaactcggtgatacaatcctcatagaagtttttagctttattctcctttgaaataatagtattaggtttatataaatattaatgtttgcccatgagaaaggaacagaatgttctctctctctttctggctatactttgaatcctagagatcagcatttcccagaaagattaaattttaaatgaaataaagcaataaattggttcagttgaaatgctgacctttaaatatatagatatacaatgttcttccttataatgtttttgtttttgttttgtttttcaatctcaagtgtataatgccaaactccccttttcatctttgttgttaaagaagagagaatgattcaaggttcactttctgaccctgcagagagtgggtgtgttcatagtaaaaatggagcacaccatggagatctagtatttgagtttcaccagccaggcagagtaatttaggtattgaatgtgtcagaaggattttgtccatcttattcattgttggcatggcttatacagagttagtgggtgcacctgtccatggtcatcccacctgctctggggatgagctcactctgcgacccaagtatagctggctgagggcagcctttagactggggagggcgactaagaaacgaccattttatactatgtagatgagctttgctacattctccaggacttttctctctcactgaatgctagatatgctgctaagggtaccagtgcctcagtagtttaggttcttctgtaattccctaccaaattcaaattctagaatgatgctgtccacttacattttaggtggcaaacttaacacatactcagaatcaccaaatgactactaagttcagaagactagaaggaaatatgtgcttaatttgacctgggttcagccctgtctattacctctgtttatgtgaattctccagaatgaacccctcagggcctatactttctcatttatagaacccaggtgtccaagtgagtggttgtaggacttttcagatattctctttctagatgagtaataatgggatttgtaatatctgttgttgagatgttgccagtttctcctctagctcttctaccgtggtcagtaacagcaaagcttgtttattcctttgttagtgaattgccagggttctgaggctgtgggctgatcctcccactgtgcctggcttccatgcagatccactattctgttgtctggactcggaatgtgggcagattttctaatctatctaatcctgaaaacccccaggaggtaaggtggaggcttacatcaggcatgaatcttagaagacacaccaagtatactctttaaaggctttggaaagtgaactgagatgtacaacagcaggtagaactggaattcatgtcctgatctagccaattctaaaacatcagtcttaatcaatactgttctcagagaactgcctttcaactccttcatcatctctggatttgataataaaaccttgtgctgtgatggtgaaccaagaggcttagatttccgtctgagccatgctggtgacctcacctctggcagcagcaatcgccatcacatgatccctccacgaggaagtgaggaggaacacagtggtatcacttaaaactgagtaaacattagccactcaaacttactgccacctatagaagtcctgaccaccagagaggatcacatggatttataatgttagtatttcatgatgagaactcctcaagtaaagatgcttttagcacaaaatggacctcagatttccagattccaagaattaagggtagccagtcatgaaacatccagccatttaactttgaaaggagtcagatattagaacataatcactcaggtaacttccagagagggcttctggcttgtttcagttaacagaaagactatgtatttcaaagatccaggacatattaattaacccactatggcaagactgagttctgttcccccaccccatcccctgaagatatctgttctacatcactctgtttctaatactgtcatcaagtttgtcatcctcaattgaggcatttcactaagtgagcaaaggaggtcccctagccagtgtataagttccagaacagaaatccaagagccataacacaaaggattaagatttgtttctgcaaaagatttttgtttcaaactaaaatgccaagtgttcaatgccacattgaattccaggggtaagcagcatgaaattctattcacaaatactcagtggtgttttccataaacttaagaaaggatattttctaggtgccagaaaggaattcagcctatccacaactacctgtctgtacatgtgtcacaagtgtctcatatgggcgtgcacacccatacccatgtggctgtgcatgtgtaggcatgtcgatattttgttctagttttattagcatggtccttgatgctgggccatacccagagtgctctgattacatacacttcactggttccttgttagaaaagcccatctttcaaacttaagtagatttcctcaatggtctattttataaagaacaagcaactagtcatatgtggctatctcttctcttatgagaaaaaaacaaaaaacctcaatcaagtccatttacaagaagaacatacagaagatcgctttaattttggcttcatcacgaagcttctccaagccatgtaaagtgagtgggacaggagtaaggggcagagagaaaaggagaaatggaaacaaagggcaagcacacttttaaaagttcctggcaacacatataaacaagcaaacaaagaaaaatatgtccagtcttatagtcaggtgcgatgggaattccctgtagcccagcactatggaggcagacagcatgagtatgaagccagcctgagttacatagaagttctaggccagcctgggcaacacagtaaaacccttatcaaaaagaaaaaagaaaaccaaacaggtcttttaatgctaacatttgtttatatggttcagagctctctagcctttgactaatgatcacactgttctgtttattggttgttgagccactgttgagggaccagacgtacaggagctgagaacactgcatacacagttaccttgcctgccattatttgcatactcaggtgtcctaaactgttcagtgcacctgtccttgacacggctcgaaaagaggccgtccactcatcgaatgaggtagaaccggtcttcttaacaccatcctcttcctcatgccctttccctaatgttcctaagttgcaatggtgtccttgccacattttgcatgtttgcagtaactatagttggtagacatcttccttccaaacaccctcccgagtgccctgaggctatttagtaagagcagatgtaaacataagacccatttcccttttcagaatttatacatagcatgataattagatgtagcattttataaaatatctcgccccgggcccatttatcacaatgctagttttaaatgactgcttcttagtcatttaaaactactcaattaatggtaattgtttcttgaaatctaactcagtttaagtcccacccacccactacgcacagtgcactatgcactaattactacacataagcgaagattaatatgctttagaaggttcatcattagtttgacccttccagcattgcagtgcgccgggcaaactttcttttgttgttgtgtttgttctcgtagccagtttcatgaacaaagaagatggttagctatttttcaaatacccactggagactggatgaaggctttggttgttcaagtaactggactatgattagactattgaaccatactccctcttgagtttttctgttttaaaagtttgatggtaggatcttttccagtttttcttgttgcattatgttaacaaaagaatttttaggctgatttggagggtgtgacttcctggtgcctggctgatagctggcatgttgcaggttggaaagagtaaggtaaacaaagaggagggcattcttccaagaccctcagctgatgacgttagttccgttgcctctgttttcatgtggctgaggttattaagaactacagctcatcttctctcacttttccagacaaagcagagttccatgaggccagagctagggcagagctttcgatgatgctgaggaagccgaggaagaaacactttgacagagagatgtagataaagcagctgctctgctctgaatcatgcgattgcccccagggtttgacggcacagggctgtgggagaatgtatgcctgttggcatcttcacatagaacagacaaaatcggtacccccttcgtgcaaagtactctaagatgcttcctgcatttattagtcctctaaagatccaagcactgcttattggtatgtgatttccttcctataagtgatatgtggtatattgtgggctttttgttgtttgtttgtttgtttgcttgtttttatctagccctagacgttaggcttgttttaattgtgaggctctgttagtattccccattttggcaagactttaccatattaatgtaccaaattaaagagaaatattttaaatttacttttctcttttttatcaaaagcattcaaagaacttgtagcagaggtcattttgtagtttgagggagatgtatttattttacttcttcctttgaggtaatatgtcaattcatagagtattaaccatcttaaatactcctccgcccacctccgttcgaagaccctgagccacagctgtatcagagggtgttaagtttgatggaatcgtatgggctgtaggcagcaccagcttatttatcttctcttcagtatggggcagtgttttatccaaatctgtttctcctgtagctttctctctgtgactcagtttgccctaggtgattgtggctttgggaaaataaagtcatcttgcccaccattagatgaggggttttgtaaaatagccaaaatagccaaaggctatttccctaactaagggaaggtcactgtattgtcacctcgttcctgcagcttttgttttgtttgacaaggtctttgtattatgtaccgctggctgtcctggaactcactgtatagaccaggctgacctcaacctcacagacatccacctgcctctgcctccagagttctgggattaaaggtgtgtgctacgtaccgcacctggtgctccagagccctttacatttcagtgaactcagaagacaataggatcattgttttagagtatctattgctctgattaaaaacaaaacagaacagaacaaaaaaaacgtaaccaaaagcaactcaggaaggaatcggtttatttcagtttacaattgtagtctgttattgagagaagtcagggcagagaagcctgcaagcaggactgaagcagagaccatggagaaatgctgtttactggcttgctcccatgctcactcagcctgttttcttatatcatccaggaccgcctgccctgggcttacctcaatcattaaccaaaagaagaagaagaagaaaagctccaggcttgcttacagaccagttttacagaggcgctttctcagttgaggttcctcttctcagatgtttatgccaagttaaccaaagcctaccaacacagtcacatacactatttactatttgcaaggcatcacaggcagtgaactgcagagctggagtgcacaaccagaaagggtggctccgtgacccctacagtctatttcgtctctaagtagccctttagaggcccaggtttgtgagcaagtgcctagtgatacccatcatggaggttggtgaggcttccacggagttaaactttatcacagggcacagatgaagaatatgggagcctatttgtcctaggctaggcagctgtgctggccaccatggaatgtaggagcttgctggtgaccacagtgatgcttctccatacaagctgcggcatgtagggggaaataggagggtaagaaacactaatgcccctcaacagggtgagtgaagaaaggggaacagacagcaagacgccattgttttgcacttgggtgagcacactgctgctgaaagagaagagccagggcctctccagagagccatgagaacgactggatttgagggtgggtctcagtcttgaccctgtgccacagcaagcaaaatgaacaactccttgagccaagataatcaacatgaaagtgtgtttatacagacgaacagtgggatttctccaggattcggggaggtaatccctgggttcaacactctatgaatagcataccatgttcctaagctgagaaattactgtgagctttttatgagaatggattgtgggaatcatctaggtgaaatgtacccggcttcaccttgagtccaaggcccactaatgcactccaggtgtgcaggctgcccagactctgtttggaagctcaaagaagaactcccaaccctacagggaggctttgaagaataccaaggacctttctatctctcctagtgttttgtattctttcagcccacatttggtaattggagatattcatggtgttaaagccggacttgttccttcttagcctgccccttcaacagtgaaatcttaagcctgtggcttcaattgtgctgtgcgcggtagtgatctcgccccagtgtccctgggatgtaagaggagagcggttgaaatactagaaagggggttataggaaatcatccagcaacaattttccatgtctatagacgctttcatttgagggcaagagaagctggaggggtacctacaaaaggagtgggtgcgcaatttaaaatgctttggttataggctaagaactaaagatcaaagggctgggtcctcagaattacatagtgagtcactggaaaaactgagtagaagttgggcatcctgttcttcagtcttatatggctactaagtgcaattgacttttaagcagtacctgtatttttttttctcttagaccctatcccatccaaaggaatataattatgtgtgcattatagattgccaagccctagagcaccatgaagtactttgccatgataatatggtggctgaggtgaaaaggtaatgagaagccacacatctgatgtgtggtccctgtaatcccaggggaccgtggccttctgtacaaccactgtactggccatctcatggattcaatttacaggttctttaaagagagaatatgcccaaagctaactcgacagtgatggggtgcataggcaactgacttttacaactttgtctgctgtatgcccttctttcagtttgttgcctactagtttacaccaactttatgtcaaactatagtgagtggtttaacatatgataggcaaatatgtttgcagagttaagggtcactagatttgcttgaatggaggatatgaaagtcctgtaaatgttttaatggtctatccaatctgattttttttttaaagtatgtcctctgaacatatattagtttctttctttcttttttttttctttttttttaaataataacaggtagactgctttgaagctaggtgacccaaaatgaaggtggctaaatcacacatgctagtgtgtgtgtgtgtgtgtgtgtgtagtaaaagatagacaaagacatctttaatcttctcactctgtgctgaaaggcgaaagggacctgttctacagaaacagtcctcaggcagcttccccacatgcactggaagagctcatcttctggagcaagcaagctttctttctcagccatggacttagtgactacatttacagaggtaagacagggcaggaagcactgggaacagtcaggaagtgtgttgaggtcaggaaaatgtcatagctttcctggggtgtgtgcaaatatccagatggcagggctatcacagatattatctctgagctggctagattaggatttaatgcagccctactagttttcagatgagtaactttaatcatttaatttatcaacctcagctacctcttttaaaatatatataggaaggtattaactacacaggtttattttgaagatgaagtagaagcacggatgccatgccagctttgctttctctctctcctctcattccctctttttgtcccccctctccttccttcctcttcctcttcctttcttcctccttctatcactccctttcttcatacagaattatatgctataatttgttttatttatgacccaccaataaaatattatcaaaatctcctccaaattccagtggacatttgtgctgtggtgagtgttttcatgagttgtttctaacatgtatgggattctgtatgtcagtcagttgatgtcttcacctggtgaaatcaggtagagtgagttcactgacaggccttgccaagtttgaacaaccctggactcatgaggatgtctttatctaagactgtacagaatatggcctttcccacatggctgagccatttgtcatcagtcagagagcctgcaacacttgcccttatgaaacataaccctaggtctgagtggctcagtttatacaaattatttcttgctcaggtgaagttgaatcaaacagtcatggttggtgggagactcatcatctctaggcagtagttctcagaatgtgcctctcatctgtgactcctccgccttaaaaatgacttccatagtcacactggcagaggaaagcatgtgtagaagatcctgaaggaagagcatgtgtgagtttgtgggggaactatcccacaccctttctgctcacatcacattgcctaggagttagatgaccatattgaactactagggctagaaattataccttgtctttgtatctgagaagaagacaaaacaggttttgtgagtagctagcaacctctgacaaatggctgttggctcagccttgctcttctaggtccatattccttttctctctttcactgattcttatcccagtttataatgttcacttatggtttcaagtttagtttcaagtttccctgactggagagatggatcagtagatgagaccactggctgttcttgcagaagagctggcctcggttcttagaacccacatggtgtctcacgactgcccaaggaatctgatgccctcttatgacctctgtgggcatcaagcatacatgtggtgtgcagacatctatgtgctcaaaacactcatatagataaaataagtcaaatattttttaaacaaataattagtttggttaattccttattggaatagggagaggcttacttgctctcatctgataaactattgaaaaaaaattcttgacctcttagccatacttctagttagagagagttagaattatttctgaattatagaaaaatcttagacacgtttgagttttgacagtcatttcaaatgacttcttttttaataataataaggttgtttctgtctaaagattattgttagctttgcttatgagtggaaataaaatagaacatttgagaagctgcatctaaaattttcttctttataatacttgggcatttttaaatgcctaagaattttgaaagacaggtgagtcagaaagaagggatttccagatacagtgaaaaacactcttggcatttagccctgattagccatggaagtgattcatcttgaagcatatctagtaagctacagagaatcattggaaatattggaagccaacacatccacatagtatgatgtcacatatggtggtaggaacacaagtagttctttggtcccctttttacttataactatttattttccctctaagttttctgacttgagatacattccttctctattttcttgccttttcccaatctttcttcaaaggtgaaaaccaggaagagcaggcggtgtctagcctgagctacctcatgggaccaatgttctgcttagaatcatgggaaacaatgtggagggcacacactgaagggtgtgtagactagttacttacgtaatgtgacattgccagcaggtttagctttaccttaagttcggagtttctgtggggcaaaaggaacagcccacctgcagagtacttgaaactcttgtgtttgcagtttgtccatggtgcccctccaagagactgcagttctgcaggtcccatatgcagatttattgttagcaaagacagtaacttaagatttgctgccagtgtagattcatcagcattaaatgatcatgcttaaagctgcagggagcatatcatcctaacaagggcatgcatcatgctctggggaaaactattgagatggcagaagacatggtaggtaagccctgcctgctaaactaaaactcctgttcgggtgtgtcttctgggaccacatggaaatacgtgaaacctacttgttagtggtgattgtcacatggaaccgcttagttcatttatctggcttcccacagcctttgtgattacaggctaccatcaagagattttatttaaattaaggtgaccttttgtatgttttcctgtttgtgaaagtaatgcataatcataaaattctgtccttattaagaaatacgttatggagaaagagaaaaggtctcccataattttcaacacaattgctgttaatatgcatgtgtgtgtagtcctttaagtactttcaatggctttgtcaatgttgtacacttcattttcttaataagagatgggcttgtgtggtctatatagtttctcatattttcccttcttattacattattttatagcaggattttctaaaatgttttcctttctcctatttcttcagagtcccatggttctattggatggtatatattccagaaaattaaaaaagaaaagctctaggtggtaattattcccccccccccactccccttctttctcctctgtaaattttttttttaaggaagatctctcaaaaacacttttaaaggcattgctattaggactgtccatagacctgctttcctgcttgccagttattacttcgattgttgtgttgatagtgtgatgcactgagtcaatgacttcagagaaacagagttcctactcttgattttccagcaataggcttatgcaagctgctagactcgaggggcgatgttgctctcatctagaaagacggtgtgagtagtctacctagagaaaaacaaagttcttctatggaggacagaatccaaagtcaccagtttgctttgtaaggttttcttggcacgtttctcttttaccaactactccgatccttgtgcctatgggtcagacatgtggtttatcaccccctccctccccttgatgttccttacacacacacacacacacacacacacacagacatacatacatacacagacacgcacacacacacactggtgttccacactgactttccctctcctgtggtgccttttgtttcttctatttggtgaagcttgtgtgcccacagctctttagtgggacatcactagactcccagacataactcttcatcctgttctctacctctcttgggtggctctgctgttatgtcacattttaccttacttgtcttaattaattaactaacttaatttttgcttatgtggtgctgggcatataccactgagctccccccagctctcactttgttttgtcatagtgtaatacacacacagtaaacttcacgcagcttaagtattcaggtgactaattatcaagtcagagctaatgcctagaccgcagccttcagaggataagaactgtgttttaccattctactgatcccacaggtagctcagtaagttctcaattatgactgacaactggtaacttggctcatttcatccagtgtagatttcttataaaggattttatttatatttttgtaagagtatcaaaccgaatgttcattgccattcatttcagttcttaagagaaacaaactaaaatattgacttcaccagtggcagttatgggtcaatgaataaaacacatattccacctatttttctattaattgatagtttagtatctatcttataaagttttactagatgttagtctcaagataaaacattaagcagaaagatatggcttgttgtttattccttacaggaaaaaaaaatcatcttttccctctctaatatccctgaatctagatttagatttttaaaatgcagtgatgttctatttctggtttacttttcccattaagaattgatacagttttatgaaaggtacttatgtattgtttttaaggctagaaagcagaacatttgttcagactaatttaattcaacagaaaggctcaggggtcttcctgggaaaatgatcccgaggctcaaaggaaagtcaacgcagttcatatgttagaaggctggcctagttcaccttttctgcatacggaatccaggctgagagacagattacttggccctgcctgagattttcagctcttctttaagaggtagatacggaaataccacctatggacccagacagctgatcccttctcagcttgtcctagtatttttatagaattgtctttcttgcattaattagtcaattaatgagcttagtcattcacataatctgccattattagtatcttctatttccaatgtgtcctttgctctcacatatcagattaaaatcttgttgaccagttttacaaaggcagttttactccttgtgtataattgacttaattgaacaagtattcatttagacccttccctgtgctcagtactgtttaagatcataaaaccataatatctctagaaggcagtatgttattccattgatttaaataatagctgatgaattttaagttctttgtgtgtggttggttttatagagttcattagtaattatgaaatggaagattcaaacaagctccgcctcgccagaacagtatatcttattagttctcaatattaattctaaatactcatcactagttaatgtcatattgcttaaggcattttttgagtaaaataccaaatgtgtatgtgtggcaggtgtctctcttctcttctcttctcttctcttctcttctnnnnnnnnnnnnnnnnnnnntttttctttttctttttttttaaattagatattttctttatttatatttcaaatgttatcccctttcctggtttcccctccaaaccccctatccccttctccctccccctatccccttctccctccccctgctcaccaacgcacccactcctgcttcctggccgtggcatttccttacactggggaatcaattcttcacaggaccaagggcctttcctcccactcatgaccaactaggccattctctgctacatatgcagctggagctatgagtcctactgtatgtagtctttgattggtggtttagtccctgggagttctaggggtactacctagcctcatatggctccttgagattggaaccctggccctcactcttgagcggtaagtacattctcccccgagccatctctccagcttgcttcaggcttcttacaagccagcattcttgttttaaaaggatattgtaattgcagaaacactcatttgtgttaagtacatgttgtagttcttttgtagaaaactccaggggattgttggcaggtttgtgagtaaaataccagttgttcagacctgaaactgaggacccatgcttggaaattcacctgctgtagtgtcaaagtatatatgaactaggcctaaaattaagtatctgtgttggatcctggttttagagaggccatagatctgctttatggaaactcgagcttctatgtagagacatttgaagccactacaaattcaaactgtttaatgggcaatccaataaaaggtatttcacccctgtgataagaaagtaagtactaagtgatatttctttatcacccagaaagagaaaagccaggctctgccttcagtgttcatcccataaggacataggaaagatactaactagagaacactctctaaggaaggaatgatggaagtccctttcatcttgttatctgtggtgtcttttgaaagcctaagtcatattcagaagtaatttctcaaactcagagaacacttagatcgctttggtctttgcctgtaaatcagtggttgatacttttgtgtgtgtgttctcctttagagttttgccctcactagagggcagagaaagagttgatttcattaatcaccaagagctgtttaccactataatctagagggcacttgctcatggcagggaataaaattaccttggttgtgtaatcgtggttcactgagactggccccaagtgtttgggaattattcaagagctgtctgaaactaatcacttagctagttttctcagtgttctctttaaattcacctgtacaccttccagtcgcattgacagaagtggaggttccagaaattgcaacattactgacttccagccatgtgacataggatttcagacacccagttaaattttaagccagacatttctcttcaattcgggtcacctacaggccagacaagccaaggtcatatgttgaatgaatgtatgagttctgctggttcccgaaactctcccgttgttcatagcttgaaatactatgccatggttaatcataagtgtcagctgctgtgtccttttatttattaaccttaaccaggaggacccagcaagaatcagtgctcacgtggagcctttcatggtatctttttggacacttcttcctctgtcattgtctctgaaagtaacattttctgtgctgtaattgagtgaccaatctgtaaggctatgtctctctccctgatctctgttttatagatatatagttttgtaagaattaaaaataaaagatttgtctttgatcaaagaggctataatcagaagtttagatcggaacattttgtgaatgaatatcagaggagagcttttactcagataacttaggggcagcttatattttcacatttatatattttcagcttcataacaaaaatcatgttcagttccttttttttagtcactcagaatttttctaaactttaaggttacctttttattgttgttattattattattactattttggttttgggtttttgaaacagggtttctttgtgtagccctagctttcctggaactagctttgtagaccaggctggccttgaactcactgtgaccttcctgcttctgcctttctcatgctgggattacaggcttgtgttcccactgcctggcttggggttaactctgttgtggttttcattcatgtgggctttcactcagtaatctcagttccatccacacaggctccattgggtcacctgaacatgacgtgcttctgcctgtcttgcctggttatataatgctgttccctcagccttccgttcttccctcatctccttcaggacagcattcctgcgcttcttccattcttacatttcccttggccttgcacttgggtgtcagtgctgttctgtgcactgctttatttgacctattcaggaagtactccatactaccttatattttaatctgtttttgttgttgttgttgttccagtttcctcagcaacaaggggcatccatacagaggaccaaggccatattttctaagcagcatccaaatggtttgcttggcgcaaaactgcatatttctcttgtttcttcatcaatagatgagaaacattcgtatttggtttctcagaagtgctctgaggaaaagctaagagactgacagtgaacttggaattctcttaaaagtagttactatttctttcagaagtattaccacaagtgttcagtgacggctgtatgacacagcaacctgacttttctacaatatctaaaagttaaaatggacaatcaaccacagtaaaaggtgatatgcttaccctttgcctgcagtctgtttaaccaagccaagatgaagcaagagtgctgggaaatgagctgttctgagtaacgtatttgtttaggctgcttcttaacctctgcttcctctccatggtatctacctttttcaatgctctttttgtgtaggatggcatgttagctgttagaataatagagatcatacccaccgcgccagcactagtctgtcccagtctgatcacactcacttgactgcttaccagcaggagctcaagggtaagtagcaatggggcattaaacaaacaagccagctaagagggctgtctaggcccaaggaccagagtttctggatttgtttaaagaattaagctcatgcattgcactttctccctttgcagcacagatagaaatctttgctgggggaacatttcaggatcccagctgtgagtataacttacaatggaaaatgtttttcagtttggaaagaggcacttacacttctgtaatggaagacaaagataacaagggagaaaatatgttcaggattgtcatggcttgatgaagagagcagtctaatgttattgttagtccttgaaattagggcatctctgtttgcatcttcctgttagattggttaagaagtatacagtatccaccgtgttgaggactgttcagcattatggacattacagtaataggagaagacatggttactgcccttgagggagtgaacattgaataggtgactgatatagattaggatcagcaacagaatgatgtaagtcaggtgtaatcaaagagccccagacaaactacagaccagaaagtaaggaatagattaccatggtctctgcagttacgtcgtagctttaagtttcttggatatcctccacatatcatatcttttctcttaagcaagactgtatgtgccctttaccaaggaaagtgtttacaatcgcaaacttatgactttgagtctcttgcaaaactgtaagaagcgagcgaatgggagccaacagtgtgacaaagaggattgtggtgcaccagtgcttcatagcaaaggaggcacaatgcttggtcgtgagactgtaatagagacgatgccctttttcagctttgtaaaatgtgacttttggttataacttcaaaggaaaaaggactattctaacttgattactttccttaatttaaaaaatatagaacacttcatttccctctcagtctcagtatgttttcattttaatttgccccacttattagtttattcagcacataattatttttggcaggcttatatcccatgtgccctgtgggtataaggttggggtcctggacaaagctggaacaactaaagggtaaagcgagagcctacaattttaacttgttaagattgtgtgtgtgtgcgtgtgtgtgtgtgtgtgtgtgtgtgtgtgtgtgtgtgtgtgtgtgtgtgtatgtgtgtgtgttttctgtagttaattttgaagaaacctctaattttagctagagttaccgtgtcctcatcattactggtttgttcctttgcccactcattcatttttcaaattaatgattgatggaaatctagccatgcatgagtcatcagagggatcccttctcattcagctctgatgaaatcatcaggtttcttcacatgcctccctccaggatgtgctgactctattttcaacaccttctaactggcctcccaattcctgcttatttgcttccctcttagagtaagtttcaaacctggtcactgtgagccacgataaaaactgcgtttggatgtgcactgctgctgatcatgagttaccgtatacttataagactaagacaaagcattctcaaaatcatagatgcctttgctctgtataattcattgtggtattgttttggattctttctttctttctttctttctttctttctttctttctttctttctttctttctttctttctcatgcttggcatggtcatccaagttcatttcatgaaccactatggcttggagtgtagtgtttggtccttttctttcttttttattttttaatgatatattttctttatttacatttcaaatgctatcctgaaagttccctataccctccccctgccctgctcccctacccacccactaccacttcttggccctaacgttcccctgtactggggcatataaagtttgcaataccaaggggccgctcttcccaatgatggccgactaggccatcttctgctacatatgcagctagagacacaagctctggggtactggttagttcatattgttgttccacctatagggttgcagaccccttcagctccttgagtgttattcgacgcgttctcacgaccggccaggaagaacacaacaaccagaatcttctacggcaaagctttattgcttacatcttatggggccagagtgtaagaagcaagagagagagaaaacgaaacccctttcctctttaaagagaacaacaattgcctaggacgcatcactccctgattggctgcagcccatggccgagctgacgttcacgggaaaaacagagtacaagtagtcgtaaatacccttggctcatgcgcagattatttgtttaccaacttagaacacaggatgtcagcgccatcttgtgacggcgaatgtgggggcggcttcccacagttcccccttttctattaataagagcaaataggccacccatattaatgagagtggagatagaggtcaaatccccagtgtgtaggtaaaggagccatgtacaggattagctcttaggctcacaggcttttacccagagcaaccctgacctgctcccgtgtcgttttgcctgggggaagggaactaggacactgaaccttcatgaaagatgacatgtctccctagaataggctcatatgtgccgcagagcctttccattgcagtgcttagccttgcaactctctcgggctgctgaagcacactcactctatctcgtgcaatgagactagcctcgtgagatataagagctgagtggccagcgacctattgcctaagcatagataaccatatatcagggggagctccatgttctagtcctgcaagcgcctgggcaataaccaccttgtctctcctagtttaggccttaagcttacagaccaatcaaagaagcaacactaatcctcagcaaagtgtatctccaaataatattaatcccacccaattttttaaagaaagaaaatgctgaggagatccaattgggtaatcctttggtcagggacaggtccaagcgcgtggagttgacctgaagtctcaattctcgaaggatctgttcaaattcagccatccaattctgtaacatatactgaaaaagactttttgacaaattagctgtcctagtaaatttaacatactgaatggaaataacacacaatcccggaaacttttgttcacatccctgctgagttatttgtcataatacatctaggtgtttctggacaagatctatgagttgattaaccagcatgagacctctctgtatcttgacattagctgaggcctgttcatctatgactgtagtcactgaggctgacaaagtgttaatggtgtcagtcatctggacctgtccagacagaaccaaggctgtctgaattaaggccaaacccagttcccagttagtggtaaaaaagcaggagaatacttgagcattatacatcaccgtcattgggagtggaaatgtcgacattatcccccaacgctgctctctctttattattgacgccctggacatcaccaagacgagggacattagtattcccttggtcagtctggaattttcgggtgagtctttctggtacccaaaatgggttgtcttcattctgtgggaaaacacagatagctcccctggatcttatcaaaataggatccgggccataccatttattatcaagaacatttttccatttaaccatctcattgggcctatctggctctgaacaatgacgttcagccgcagtatggccatgagcatcaatatttaaaaaattgagtgtaaagagtgccaaagacaccgacactcttggtgctcggggtacagtctcctcaaaagttcccctcttctgttttataagataggctttgagggtgcgatgcgcacgctcaacaataccctgtccttgagggttgtacggaagtccagtcaggtgggttacgtccatctgacggcagaactgttggaatttttgagacgtataagctggtccattatcagtcttaaggagtctgggtttcccccaagcactccatgcctcaagacaatgttgaatcacatgtgaggctttttctccggttaacggagaagcaaacatgatgccagaacatgtgtcaatggacacatggagatattgaagttttccaaaggaagaaacatgtgtaacatccatttgccagacctgtagaggtcgaataccgcgtgggttaattcccacatgaggaactggcaagaactcacagcagctttgacattgagtaacaatgtcacgggcttcttttcttgtcaaggagaaacgactgcgtaatgtttcagccgtcacatgaaaattgttatgaaaatttcttgcagcctctaccggggatgatagggcagcagccaccactttagtggccttatctgccaaatcatttcccagagccatggggccaggtaggcctgaatgggctctaacatgagtaatataaacaggagatcttctagataacaaaactaattgtatctgctgaaaaatattggcaactctactggaaggcttaatcactccagccacttctaaaagatttactgcatttaccacataacaggaatctgacacaatattaaggggttctaaaaaggtttttaaaacttctaagaccactaaacattctaccacttgaggtgaattttcattatattgtttggataccactttaccattagccacataggcacctatgccagtttttgatccatcagtatataccacaatcccatttttaagtgggtttcttactgttatttgtggaaacacaacagattgattttgggcaaactgtaagattggatgttttggataatggttatctatttttcctgaaaaggaggtaactaaaactgcccaatcattagatgcggctgccaaggtttgaatctgtgcagcggtataaggtacaattaaaagatatggactttgcccaaagtgggtgattgctgcttttaggcctttaagggcaagctgtgcaattgcatcaggataccaatctattattttagctggggatacgtttggatggatccacaacaatggcccattttgccacaaaactgcagttggcaattgtgctgtcttaaagacacacaaactaaaaggctgcgaatcctcaatacgttgtaattgtgcattctgtaaggctttttccaccttttgtaaggcctggttagcagctagagtaagagtcctaggggaggagatatgaggatctccttctaaaatactaaacaaaggccttaactcagcggaaggaatctttaaaaaaggtctaagccaattaatatctcccaacagcttttgaaaatcatttaaggtatggaggtgatctcttcttatctctaccttttggggcacaatcttatctggggacaccacagagcccaagaattgtcctgtatcagaaatttggaccttttctgtggctatctgtaaaccccactgacttaaagttttaagtagaaaaggatatgccttttgtagcatggtaaggtctttatggcacaggaggatgtcatccatgtaaaggagcaaaattaaagaggggaattgttccctcactggcaaaagagcttcttgtacataaagttgacacatagtaggactattggacattccctgtggtaagaccttccattgatacctcttatcaggttccatgtgattaatagaggggatggtaaaggcaaatctgggcctatcccttggacacaaaggtatagaaaagaaacaatctttaatatctataatgattaaattccagccacgtggtaaggcggaaagtacagggagacccctctgtactgggccaaataagttcatttgctcattaatggctctgaggtcatggagcagtctccactttcctgactttttcttaattacaaaaattggagtattccaaggtgaggtagagggttcaatatggcctagttttaattgttcctctaccagttgaatcacagcttctagtttttcagaggataggtgccattgaggaacccacactgggtcccctgttttccatggtatgggtcgtgctgccccaatggccgctaaggaaaacccagaccctgtctgtcttggtttccattaggtgagatgggctctatccttccctgttcttgatgtcctaacccttttccttctttataacccatctttgccatgatattttttgctttagctgaataccctcctgatggggcgttttcattggacaaaataaggcccaaatgctgcataatatcccttccccagaggttaaccgggagtgggagcacataaggtatgaatttcccttgctgcccttcagaggattcccacgtcaaggcaacggagcttatagtgggacatgattgatatcctaggccctgtaatgaatgagatgactctgtggtgggccatgctttgggccaccaatgtgtagaaattatacttttatctgctccggtatcaaggatgccttcaaactcttttccattaatcttaaggcggagcttaggtctatcatttaaagatacaaccaaataggcagaatcatttcctgaggagcccattttctttatctcaggtcctgcagatttctccctggtattatcagggaggagcagcagctgagctatcctatctcctttactaatagaaaaaacgcctttagggcttgagcacaggacctgtatttcaggggaatgttgacaatccataactccagggtggactactaagccctgcaaggtgagtgaacctcggccgagaataaggcccatggttcccgggggcaaggatggtataggctccaccggcaccggctgaatactcatttgaggcattaataggaagtcggaggcggcacgcaggtccacccttgtgggtcttcctgggtcgtctctctgactgcttcctgggtcctgacaaaccggttcccatatctttgagggccctgggaccgagggcccgatgacccgttttttggcacataagctgattgactatcaggtgggggaaggactctgccccttatatccctcacagagcgacactggtcagctctatgataacccttgccacacttagagcaaagagtgagagtccctccctgtttatctggagctctgcaatctttcttaaaatgcccaggctttccgcaattaaaacatgtcctctgattatttctgctcatggagcggttctgagattgaaggatggcagccgctaaacctgcattgctaagaggtcccccaagctctcgacagaccctgagccagtcttgtaagcctttgttctttcttggggctatggccgctcggcactcctttgtggcttgctcgtagattagctgttctatgagaggcgcagcttgctctgactctccaaaaatacgctctgctgcctctgtcattctggccacaaaatctgagaaagattcctgaggtccctggattatttttgttaactgaccagtggtttcacctgctcgagagagcgccttccaggccctaatagccgtggaagaaatctgggcataagctccccaatggtagtttgtctgatcagcagaataagctccctgacccgttaacaagtcaaaagtccaatctctctgctctggagtcaaagcagctgcgtttgctcgggcctgcgcctgtgcagcttcgtgccaaagcgctttccattccatatatttgcccatactagggagagcggcttttacaaccgtttgccagtcggcaggagttagtgccatgccagcgagcctgtctaactgcaccaaggtaaaattagcattggttccgtatttacgaaccgactcggcaatttccttaatctgtacgtattctaccggagcgtggacacgcccaccctcggctccttcaaagactggaaatgcctgttgtattttcttttgttcctctcggggaatgaatgagtctgcgcactgcctctctgtgcactgcctctctgcgcactgcctctctgcgcatctctctgcgcactgcctctctgcgcatctctctgcgcactgcctctctgcgcattgctgacgcactacgcagggcgggggctccgcatagggcggaccttgaaaccgactgccgggaggttgaacagtacgctgactttcgccagccgcttttggcttttttcttgaccaattagctggctggtaatgggctgcttcttcctcccagtctgtttcctcagaggaggattcttcacttgcttcagagctactaagagctggcttcctgagctcatctagtgacgagtatctcctagagacctccgctaatcgatcttttttcttctccctttttcctctttttcttctaatctctctccaggtattcctacctaaccttaacttttcctcgggttcaagacccttggaaaggcctgtatacttattttgtgtaccatacttcctctttgttcctactctttcttcccgctttacttctgatagcttgtcctgaatttcctctagaattttcagccctatcttaatcacttgataacatgtgaaaaagaacaaaagggctcctaacaccagaaaaaattcaaggccaaacatactcactggtactctcgttccccagctgaaaagttctgaattcatacagttgaatccttcttaacagtctgctttacgggaacctttatcaccgtcgttccccagctgatgagttctgaattcggcagttgaatccttctcaacagtctgtgttacgggaacctttataaacgtgatccgcagttctggttccggaatgagggatcttccctgcgccagtccggagttttttctcgtcccggaattcggcaccaattgttattcgacgcgttctcacgaccggccaggaagaacacaacaaccagaatcttctacggcaaagctttattgcttacatcttatggggccagagtgtaagaagcaagagagagagaaaacgaaacccctttcctctttaaagagaacaacaattgcctaggacgcatcactccctgattggctgcagcccatggccgagctgacgttcacgggaaaaacagagtacaagtagtcgtaaatacccttggctcatgcgcagattatttgtttaccaacttagaacacaggatgtcagcgccatcttgtgacggcgaatgtgggggcggcttcccacatattttctttatttacatttcaaatgctatcctgaaagttccctataccctccccctgccctgctcccctacccacccactaccacttcttggccctaacgttcccctgtactggggcatataaagtttgcaataccaaggggccgctcttcccaatgatggccgactaggccatcttctgctacatatgcagctagagacacaagctctggggtactggttagttcatattgttgttccacctatagggttgcagaccccttcagctccttgagtgctttctctagcttctccattgggggccctgtgttccatcctatagatgactgtgagcatccacttctgtatttgccaggcactggcatagcctcatacaagacagctatatcagggtcccttcagcaaaatctttctggcatatgcaatagtgtctgggtttggtggctgattatgggatggatcccgggtggggtagtctctggatagtccatcctttcgtcttagctccaaactttgtctctgtaactcctttcatgggtattttgttccctattctaaggaggaatgaggtatccacccgttggtcttccctcttcttgattttcttgtgttttgcaaattgtatcttgggaattctaagtttctgggctaatatccacttattttgcatgtctaatgacttcttttgtgattgggtaatttttttgtctatgtatttggtttattacatttatttcttatatatattaaaaaataaataaaatcaatgactatctgtggcctttgccaggacacaagtttggaggaaatatagacagctcgagtatgtgacatgtctgaagataaggtatcccaaaatgggtttacagtcatgttagagagattcaactaaattgttgaatagcaaacaatgctttcttgagttgaagattctaactatgggacttttcttatttactcaaatgtgcatccaaggttcagcagttttgggaaatgtctatgaataaagaatctattgattggaaaaagatttaagacattgatttatacattttaatgttatttctctattattatggtgctcacaaacttagagattcaagacattccatactaagcaaaatttaagtagtatctgtctacaaatctagccctacagaaggcactagaaggaaaattccaatataaagaggttaaccacgcaagaaaacacagggaataaataagtccagaacaacaagtcaaaagaggggaaacacacacataccaccaaaagcagcaacagcagcagcaacaacaacaacaaagtaacagaaatcaacaaacacaactcattaatatctctccacatccgtattctcaattctccagtgaaaagacacagtctaacagaatggacgtgaaaataggatccatacttctggtgcatccaagaaatacaccttaacatcaagggtagatatcacttccaggtgatgaaacggttgaaaaaaagatattccaagcaaatggacctaaaaagcaagctagtgtagtcattttaatatctgacaaaatagacttcaaaccaaaattaatcagaagagatagggaaggaaactacaaagggaagatccatcaaaaggacattggaattcttaatatctgtgcaacaaacacatggcaccaagtttgtaaaagaaacactaccgcagcttaaatcacctattgaccctcacacactgttagtggaagatttcagtacctcactctcatcattggacaggtcatccagacaaaaacaaaatggagaaatgctggtaacttatcaaccaaatgtacctaacaggactttacagacatgtctcctaaactcataagaatatatcttctcagcacctcatagaactttcttcaaaattgactgcatacttggatacaacattagtctcaacagatacaagaaaatttatcaataccctgcatcctatctgatcactatcaacaacaacaaaagcttacaaattcatggaaactgaacaatgtgttactggatgaaaaacaggtcatgaaagaaattaaagacttcttaggggactggagaggtggctcattgagtactgactgctcttccagaggtcctgagttcatttcccagcaaccacatggtggctcacaaccatccataatggggtccaatgccctcttcttgtatgtccaaagagagcaacagaatatatatataaatttcttagtgttgaatgaaaatgaatacactagagtctgaatggcccagaggcataagatagaaccaaacatgccatcaaagaaagaaaaggaaggaaggaaggaaggaaggaaggaaggaaggaaggaaacaagaaagtgaacacatatccaaacttatgggacacaatgaaagcagtgctaagaaacaagttcaaagcattaagtgtctaaaaaaaaaaaaaaaaaaattcagattttatactactaacttaatagcacacctcaaagctctacaacaaaacgaagaaatcacaaccaaaaggagtagattgcaagaaataatcaaacacaggggtaaaaatcaagaaaaaaacaaataaacaaaaacccaataatacaatgaatgaatgaaacaaaagttggttcttgagaagatcaataagattgacaaactgttatccacactaactaaaaagcagagagacaatatccaaattaacaaaaaaggtggtttcaatgcagaattctactagacttttaaaaaaaaaaaagtgttaatgccaatactctgcaaattattccacaaaatagaaataggagcattgctcaattcatttgacaaggacgtaactaccgtgatatacaaaccacataaagatctaacaaagaatgagaattatagatcaatttctcaataaaataactaaatccaaaatatatatatataaaaagagtgatcaccataatcaaatgcacttcatcccaaaggtttaaggatggtttgataaataaatatcagtaaatgtaatccataatataaacaaactgaaagaagaagaccacataatcatctcattaggtgcagaaaaggcctttgacaaaatccaacatcccttcctgataaaataaatccttgagtgattagggatacaagagatacgcctcagcataatagaggcagtttatacaagcccacagcacttcttgctggcttgttgaacatgctttcttatagaacccaggaccaccagcccaggaacagtaccactcacaattgactgggccctcccccatcaaccactaattaagaaaatgccccagtcttatggatcttatggagatatttttctcaaaggaggcccccctctctctgatgaatttgcttgtgtcaagtagacatataactagccagttcaccctcactacttgatcctctcattccagcacccccacccaaccataattacctattctatttccctttccagtgagatctgtctgtaccctctattccctttactgtgtttctcctaccctctatgattctatggattgtagcttgattatcactgacttaatggctaacagtcacatgtaagtgattatataccatatttgtctttctggatctgggtaccacacttggtatgatttttttttctagttccattcatttgcctgaaaatttcaatgatgtcatttttttaaataactttgtaatactctgttgtataaatatcaccacattttctttatctatgcttctgttgagggacatttaggatgtctctatttgtggctattatgaataaaatagtagagagcatggctgagcaagtgtttttgtagtacaatgtgcagttctttgggtatattctcaagaatggtatagctggatcttaatgtagatcaattcccatcttccactgcttgggtgaccacaaacctgagactagttagcctagggcatctcccccccccaaaaaaaaactagcaataaaatgattcctaattatattctgtatgttcatagattagtgctttgctcagccatcatcagagaagcttcttcctgcagtagatgggaataaatataaagaccgacagccagacattatgcagagaatgagaggccttggaacactcagcccttacggagatgtctcttcaaatccctgtccttggggctcaagaggcagaaagagtttaagatccagaagccatgaggatacccaggagagaaggccctctaaatcaacccgatcaaagcacatatgcactcaccaaggccgaggcagcatgcacagagccttcatgggtctgcgccaggtcctttttgtgtatattatagctttcaagttagtgtttttctttttgtgtatattatagctttcaagttagtgtttttgtgggattctttttttttttttttttttttttccgagacaaggtttctctgtgtagccatggctgtcctggaactcactctgtagaccaggctggcctccatctcagaaatctgcctgcctctgcctcccaagtgctgggattaaaaggcatgcgccaccacgcccagcttttgtgggattcttgagtatgtgactaattgagtccctgactcctttgccttcttttgggctctttaccttctgtttgttttgtccaattccaacatgttggttttgttttgtcctattatatcataatttagtttagtttactattatcccttagaagcctgtttgtttcctaatgagagatggaaaggaggtagatccagaagatcagggaagtggtaaggacctgggagggctagagggaagggaaatcacaattaggatgtagtatataagaaagaaattattttaaataaaagggggaggtaaaaaaatagatcaaagaatatagtagctgttgagaccagcttctatttactgctgaaatattcagctataacatcactgagctgaatttttagactttagccctccccatgatagagaagtaactattatacaatatagtctattccatttggggacaattttaattattataaaatttttttcttctgtaaagcttatgccgttaagtttgttcattcctccacagaatagccaacccatccttattaataaatagctaaagtatccagcaatttctttcttcctagttaaagagccctagtttctgcatttattcttcatatggcatggcttcccattccatttctcttcctatgactcttttgacatgccccagtttttctgcaagtgctataaaacatagcacagaacagaggcagtgctctggttgtgtcagcatagtgaggctgtatattttccttactctgaacactatacttttgctaatctggccttaaattgcagtggggctttcagcagccaagtgacggtattggctcatataatgttcatagtcaagtgtaacccttggatcatttcccatgacctcttattcagccttttcattctcccatctcaaatgtaggcatttccatttattctcagtcagtctcatcttattaacttcagagcaatcttatagtcagtcttttgcggggtctacaagcttggcagaagaagaagaaggaaaaggcacaccctcacaccccagtgaataccgcaaacagctatttgctttaggttcaggaaatgaaaagctctgctggttttaagtgtctcaaatggcctccctcctccaacccacccctccttctgaggccccacggaggatgtctgcaactagactccatttagggagggtaccgctcccatcttccacattgctgctcaataaaagctgtgatatgtctccattaagccaaggggcatctttggcctctccgggcaaaccctttgtgcttaactgtataccaccaaatgcagtgcagcattgtctggtagacttggtccattgtctccagaggaaaacatcctttccacaaagcccctaaatcttctgttcccacactccatctctggagagtatctgaaggctacataagtaggagtgccctttgatgtttatattagcaggcttcttttcctttttttttttttttttttttttttaatcatcaggatagtaggaaatgtggagaattaaccgcatgacagcagtagaggaattcattagagaaactgagatgcagtctgctcagatttcagcctctcgggcaagagtcacaaaggagtaatcatcttctcgttgtttttaatcatgtcctttgtaggaccttccttgtccgggaaaccagtctcagtgtccagcatggaggagcttgagagcacaactgtcaaatggtggttttgattcagggattactacagtggcattaagcaaggccctctaacctagcaacgtggaggatgggagcagcaccctccctaaatggagtctagttacagacaagactccaaccaagtccttctaacctgccacatagaaaatagtgatacgtcactgcttttatttaaagtgttacctgtcaaaattttcttttggaaacgtaacattgtacacaacattgtactatgaaaaattctcaagtatgccaagaaaagtgatgatgaaccaaattttgcaaatgtgttctcctctaacttagtctcaccagagatgttccctttcatgggcctcagaggcaaattgtgttaacttgccatcatttaagatatgcataaaatttttcttgaaggacctcagtgaattaaagcaatggtttcctctgtgactatataagggcatccatagaatctccagatactgttgctgtaccaagatttcgctcccaaagtctacagtcatccctgtcttgtattctgatttttcatgagtttttcaaactcagccacattgggaggctctgtattgaaattattgaggaaaaaatcttttctcaataccttcatatatttaaaaaattcatatttatgtaaaatttcctgatcttataaataaatcatttgtatctatttttaaaatcaagttctataagactattgcttaattatgctttctagctagttctgtgagtaaatataaccatcaggatgaatgaaagcaccagttcttcaatattagtgatgtttcttgagaaagaactcaaaacctgaaggactcgtgcacataatttatcttaaagccatttggttttaactttagacaggtccagttacctacacacacacacacacacacacacacacacacacacacacacacacacaccatacacacaacattgttctgagatgtttggggataaattatctgaattttgacttcttttaccactaaatgtttcagtgccttttttttttttcttttagaatttagccccagccttctcccaattcctagatcttttaatatctggttcaggttataccttgccagcatggtggtgttttgccctcaagttattgtttctggagatgtaaagtgttcatctgcaactcattggttatatagaattttggtcactcagttaagacatgttagatttcccctctttatagttactgcttttcccttacaaacacaacacagccatcttgcttctcatcagtatacatgtgtctcatattatatgctacaggctcaataagacggttgttacatcatggtttccaacttcaactttctctttatatttgacagtcaatactgtaacttttccttatagtcatgagaatctttctcctctcatctatccatccatccacccatctatccacccatctatctatatactcatccatccatatacccactcttctttttttttttaaagatttatttatttattatatgtaagtacactgtagctgtcttcagacactccagaagagggcgtcagatcttgttacagatggttgtgagccaccatgtggttgctgggatttgaactccggaccttcagaagagcagttgggtgctcttacccactgagccatctcaccagcccacacccactcttttatacaaccacccccacccatcatccattatctgcccatccatctattcatccacccatccatctacctgactatctacccatccatccacccacccaccatccatctatccatccatctcttcacccatccattcatcaatccacccacccatccatccatccacctacccatctatctattcatccatctatccacccacacatctatctatccatccatctatctcttaccagtttagattcatagacttctattcttttcagtggtcagtactatattgaatttactattcatattatcccctttgtagctagtattctctagtgtcatcatgttctagtgttttactttttgacatgataagttatggtagacgtccttgtacttgtactgcttcagctcaagttatccatttctctgtcactggaaatagtattagctaccaggttcttagacatacttgtgctcattactattgtagtgtctgtgcttctcagctctttcaataaacagacaggactggaaaacatgtatgcatacatacatatacgcatatcatagaacatacatatatgcattttagaaatcaatcacatactgaaacttccagtttcaacctatttacacagactttttttttacagtgtgattcagttttgtacagtttttaagcttgagatattgaggcatatagtcgagggaagtagaaaattgaaacttatatgagatgattaaggttagtggtcaagattaggaaatcagccacagagagtgaggagtctgccaaacccaaagaaaagaatgttagagaaaaatactgaaaaagaaaatagctgagtttgtctactgaattataagatacacttaaagactgctgcatgagaagaagggaataaaaagaatagcttgggaaagaaatgtagaaactgaagttcagaaagtagctgcagccagggacgtggctcagtataagtggctcatgaagacctgagcacaggtcccagcacccacgtaaagacagacatggtatcatgcatctgtcctcccacagttcctttagtgagatgggaaatggaggcaggagaatgctcagaaccttgcatgccggctagcctgatatgtgtagctatgaacaaggctgtcgcaaacaaggtgcaattgtgggataggggtcacacctttaatgatagtgtttgagattcaggctgatctttatgagttaaaggccagcctggtttacagtgagttccaggcttgccagggctacatagtgagactctgtctcaaaacaaaatcaaatgagtaaagaaaaggtgggaggcaagagcacacatgtacttgtcttctgacctcctcacgtatgctgtcgcatgcacacatctgtacttacacacatgaacacacgaacacacacacacacataaagatattaagtaacactcaggaggctgaggcaggaagactgccttaagtttaaagccagcctagattactagaaagttctgggtcagcctgggtctactttctcagaaaaagtggatttagtcagtagtctgtagtgtcatagtgatcaaaactggaatcaatgtaagaagaccaaagctcagagggtggtgttggtgaacctctttaactgagcacacagcaggcaaagacaggcaagcaaatatttgagttcaaggccagcctgctctacaaagcaagttccagagaaatcctatctcaaacaaacaaacaaacaaacaaaaaaccaaaagggaacaaaaataaaacaggaagggtgaggaggaagaggagaaagggaagaaaactcaagagtgctcagagaaaactgaggaccaaggttgtgtctttagattttatatttgattacccaaagtagtttttttagatgtgacattagaaactcatttgagccatttttaagagtacaactttaaaataataacccaacttacactgattaccattactttagtctttggaggatatttacagacagtctttcttaaccttgtagatatgatccacaaatattattttgtttctaattgcatgctaagcagagagcacccgaatctgcaaggcactgtagacaggctatttttagggaactcatgtttttctttaaaagcttggttagcatttggaattgatgcacagtataatatttaaaaggaaaacaacacatttcctcaccccccaggaggtttcctaaaatagcatgtaatcttgcctacacggggaaaagcctcaaattttataaattgtgttggatctaacccagattacctgaccaggagagcccccaagaaaaacaaggtgtggtaaaggttatagtaatggcaattaagaaatttgtgttgtgcttgctggacctcactgaaggcagtgacccagcctgtggctactggcgtcgtttccacagctgagacatgctgtctttttggagagaaatccaaaccaaatctttgcccactttggaagccaaaatattcttctaattcctttcagccacagccaaagccgagcttttgcttgtaggatccacgtctgtgggacccactgtattaacctgttttctgtgtactgtttcaacacaaacaggtttgattttagttgcttctccatgggatgtgagaaggcagaaagtattttttgatgttatctgcttgaaacctctccaagttgcagaggaaaacacccaaggttcagagaggcagaaagaattatgtctgtagccctatagctggaaacggcagaacccaattttaggacacctgaccctccatccaggcctgccactggctcatatactacagcatctttcgtcaactgcagagactctgtagcttcatacattacattccagatgttgaccatggggcctgtgtgataacaagctgcactctaatagaagtatactatgctcagcaacagcttagtagcctatacacagcagctaactctgcacagagtgaaagccaccgactcttcattgacctgagtggaatctgttgagaactttgcttaagctcctcttgaggcggagaggaagtcctttaaaatctccttagcaacccaaaagaacaaagaaacatttttgtgattacttggcagaagtcctttgccaaaagctcatggtgtggtccagaatgagtagataggacactgccaacaaaattccccggggttgagttaccaaaagctgaaggtatagagaagtgtctctgtgtaaaacatttattccgttttcgtacttcgtgctttaccaacaaagcagtttcccttcatcctcctccctttcactttccagttctcaggctcagtttactgtcagacacattcccacacttagatatttgcattgccctgcttggcttcttcaactttacagtatgggtagactagagcattgctcatgatcatttttctagctcaacatgagaatgagtagcctctttccgaaccctttctgtgacggccccacccccacccccggctgctttcttctcctactgcctggccactgatttatgtgaagatagactctttctatagttcaagtatcaattctttctgcatagtgatctttctagtcacaaggccctttcccactcactgagaccagtgttttgagaaggtataataatgagaaggaaaaaaaaaacttatatttattctactttttttttctatttgtctattcggtactacaaattggatgtggtaaaaagtaaagaagaaaagatgtaaatgttaatagattgtgttagatacaatcaaagactttttaaggctagatctagagatactgtagaacgtagagtagacatcagggttatttgagaattgggttggaaaataaagtaatacagaaagtaccagagaatgtgttaagtagatttatgaaaagcaaccacaaatcatccttaggcctgagcctgacaaagacatcaagagaagcccagatgccagaagctcctgaaggtccacaccgattttactgtctgccccagagctgtccacagagatgaggatgctggctgacttcaaaattgtagtgctgccagcgatatcccttctctgctgcaaattcttagagtagactacttgtattctaatagcgtgtagttatagtttgccttttgtaggcaaaggtgtctaaaaagagaaatcctgtggtcatactgtcagcattatccagtctgagtgagagacacactcagttgaagatcaatagactgatttctagcttaccagatcagtttcctaagaacttgttaggaagaaacactgtgtataaggtgagttgcaaaactatgggataataacaaaacatctatgcctgctggatgtagactggaccctagctttatagcttatacagccaatatggtgtcccttattaaaaaggagatactgtaaccagtgatttggttggaaacttgggctctagaatctaattacagtttacaacagtcaaccatttgcaagctatctcacttgggtcttattcccactctgtgaaaaagagatgtcagaacagtcacttcaaagtattgctgtaagattagttaatgcattgtaaatgcttagacagagtctgacagaactgctgttgtccttgccattgtcattgtcatcatccacagtagaacaaaggaaacgccaccctgtgtatcttttggatgggcagcaaattagactggatttcactcagtgctgggtctttcctttagaaccacaacacagagaagggcctgagctgctatgatgtgaacattcatttataagatactatagtgtcttagtcaaggtttccattcctgcacaaaacatcatgaccaagaagcaaattggagaggaaagggtttattcagcttacactttccacattgctgtacatcaccaaaggaagtgaggatctgaactcaagcaggtcaggaagcgggagctgatgcagaggccatgaaaagatgttacttattggcttgcttcccctggattgctttcttacagaacccaagactaccagcccagatatggcaccacccacaatgggcccttagtcactaattgagaaaaatagcttacaggtggatcttgtggaggcatttccttaagggaggctcctttctctgtgataactacagcttgtgtcaagttgacacacaaaaccatccagtacatatatcaataaggtatcgtccagaatgttgaataagggtaggcatcattccaattttgaaaagagcagggaagtagaaggggtgttctagaacctgcagagcattgatcattggaaaagtttagcatcattaaatgattactcatgagaaaaatatttggggacaatttaaggttccccaaagcaaaccattcctatttctatcctcattttattccttcacagcttgactatggggtagaaacatggattcttatttctagaaacaatgtggctgatactcttgttatgttgttgaggttgattaaataggttcagagttggttgaacaaatgcatctttacgattttgagctaagtggtaggttgctttccatctgaaaagacatcatgataaacctcaggaatccatttgctgaccagttttctcatttaaaatcttgatgggtgctctaaatatgtgttttccgtaacatatgtttgtcttaatgttagaagaggggactcataagtccagtgaggcagcagtttttacatctgtgtaagttggagaacagatctgtcactaacatgtagcattgacatttgtcaagcaattgcttgtgcttgctgtgtgctgagtagaacgttgagtgtgctgttataaagtttccctcactgagtcctcacagtgatcctccaagatacacatgattaaatatcctattgtagaagaaaataaagagacaaagcgatgttggtttttaactcagtcccgtaactgattggagtcagaacaagggtgacttggaggaagctttgcttgataacaagagatggaggaagcctggcatggtggcacacaccttcaatcccagcactcgggaggcagaggcaggcggatttctgagtttgaggccagcctggtctacaaagtgagttccaggacagccagggctatacagagaaaccccgtctcgaaaaaccaaagagagagagagagagagagagagagagagagagagagagagagagagagagaggaaagactcagaatgcaagtgaataggcaactgagcatgaaacactactgcctatgtactttgtgaagataagaactgtcctgaatctcgggtgcattattagaatgcagtgctgtggtttcagtgggatgggggtggggggaggagaagacagagggggagagagagagagaggacattgaatggaggttattggtgtttaagaaagccagagtcttattttctccagactctttccttaaagaaagagactcagacactaaagtgactgcaaagaagatgccagcattagcccagggaaactatgctgtaggcatggcccttgttgctcttctccatctcttccctggttagatattcctagagttgggcagccagctgggtcacaacaagccttgtcttgcaaggacagagccgaggaagagaactgtgcattctgaagccaggagtcatctactgatgactccactctctaagagggaagccaagtcctcagctctacaaaaacctaacagtgctaactaacaagagtcacgaatttaagagagactgggaggaaggacatgggaggagctggagagggagaggatgggatggagatgatttaagtacaatattcatagacgaaatccctttacataaaataaatgtaaaaaaaaatccttcggaccctgatatagctgtcttgtatgaagctatgccagtgcctggcaaatacagaagtggatgctcacagtcatctataggatggaacacgggcccccaatggaggagctagagaaagtacccaaggagctaaaggggtctgcaaccctataggtggaacaacaatatgaactaaccagtaccccggagctcatgtctctagctgcatatgtagcagaagatggcctagtcggccatcactgcaaagagaggcccttggtattgcaaactttatatgccccagtacaggggaacgttagggccaagaagtgggagtgggtgggtagggaagcaggacaggggaagggtatagggaacttttgggatagcatttgaaatgtaaataaagaaaatatctaataaaataaaatttttttaaaaaaagagagattttagagctataaccgtatacatttaataaagcaatcaaataataataattttaaaaaaaccttcttggactccttagagaaaaacctctgaaaagactgaagtactattccagtgggtggctcctcatggaaaccttagagcagggaagcatgctacctctggcatttgtcaccaacccccaagtaattttgtccttgatatgttaggcttctgtatataaatggggtgaaaaagactcttctagcatgtggaagggaggcatctagatgatctctaaaaccacccctaccctggctctcttgatgagcattggtaaacgacgaaaacagtcaagtcagtagttataggacgttgaacaatggaagatggccagtgttctgaatgttgtggtttgtcatgttctcaagaggctttgctccaactgtttcttcactggtgttctgagttaaaagggaatgacagtccacaaatttatgcatatggctctcaaagaacagaagaggccaatttctgggctctggtgcccacatgcaacaaatatagtcatattccttccccaaggattcgatttgtaagcctctttattacattgtgccgtagggccaattcccaaggctgtggacagtccatgaagccagccttccctttggttcagctttgctcttgttttccctttagactgtaaattaagtgaatcctcagggattccagttatattatgtaaaaaaaagaactcagggttctgagaacatatagaacagtttgttttcttcagctttttttttccaagaagattaatgtatccctcttctaatgacaggtgggaccattcagttcactcccaagttgtcattgtagtaaccccgtgctcttacacattctttacattttataaagtgatgctttatacatgttacttgtttaaaatggtgctgttagggaactaaagcagaagaggtcaggcaagtataattgtccccatttcagagacaggaagcacaggtcccagagaatgctggggcagcagctgtaatactaccagttaatatgtccaccttcgataggacattgaattcttgtacttgttccatcagttaggtactattatctccattttgccacagggaagctgttactcaaaatgcgactttgctcaatatcaatacagtggtgactaggaaaaccagaattaggccctgaactttccgattctgagttcttcactctcaattgggagagactgttgtcattagaaaggtcatggacttttctctggctgcctactggccttggcagtcccagtacctgtgtctttagactgcttagcaaggctctatatcatgtggcagcttctccagtcttcattagttaatttttttcccttcaaaacagagaattagcaagtgaaagaagagccaaagttatcctcataacatagagaaatcacaatctttcagaatcacagagactctcagttttcatggggtcaagtgactatgacttctttatatttcagttcttcgctgtctcccatcctcagagtatatatggttcttgtacaacaatgattcaaatgtgaattcataccagctacccctcttttagtacttgtagcattggcagaggcagtatgtttcttaatgtgcttggggaaattagttctcaattgtagtagaggaagaagtaagattgtcattggggttcagtggaaggagctcaggctaacctttggcatcagcagagtggttgaaggttccagctcagcatctccctagaagagggactttaatacattaccaaaacccatcaacatcttctgcgtaagatgaaactaacccatggcccgcaggattgctggaaagagcacattgcaaaggtagttgggtatttgttaggaattaactgtatcatggatgccatgcgtgtatttgcctcagccctcaatgtagtgctacaacataggtgttattagctaaacctgatgaagggatgaaaggaacagtctcaaagaaagttcatggcttccctcaagtgaagtggagtccaaaatgcattttccaagtgctgtgatggatccttagggtttcccaagtaagactgccattaccttcctaacatccagtggttcctttgtctttgtgtgtgcctatgtacaatgtgcatgcatatgtgtctctgtgtgtgcctgtgtgtgctcatgtgttcatatacatgtccttattcctcactgctgcttttcaaccattcttgatccctccctgcttacaagaaaggccttccttggtacttgcgctgttatgtgtagatctcaggaacttagtacaatgcagtataatacacagcttctaactcttaaaagaatgtggattgtgaccctcttttgcaaacataagtttggtagttccatgtgatgagaatctctgcttacaagaagtgagttctctactttcatctgtctgatgaagagctgggctcttaacccactcagaatcagggacctctgtgggaacacagttcctgtgttgtatggtattcacaatgtggcccatggggcattaattctgatatgtctcactttcagagtctttgtggaaaaaagtctgtagggcagagctgggcattctctgaaaacaatattattctaaaggtgaggaatttgtagaagactgtttgtctagtgtctgaagtgtctacttgaaaggacaatattgtgtatattagcaagtctttgtttaaaggcaggtcttctagcaagaggttctcattcggtttctcagtagctcacagtagttaacagctatccattatctgtaatgggtctttagattatagacctaatggggatataaatttaatgctatgtaattaaaccaactcacactacttataagacatgtcatacaacaccaaaaagaaataggagcacgtggaaagtcttctgataagaaggagcaggagaaagaaagttgatgtgttgctgacccaggtgatagagcaaagaacatttaagaattgttctgttctggactgtaaagattatctgatgttgtccctattgccacccacttccaagtgagcaccagaggttacagaaaaggttgtactattgcttggatagtttctggtctaacttggtgccagcctcagcaaggagaattgtctacttttggtgaaatatcacaggtggttggtagtctgtttcatggcagtttatgtaactgccaatgatgtttgtaatcctctgaggacaggcattagagaagtatgggtttgttggaaagttatgatgttgtttgtgtgatgtcttgattttcttgttctgtgaacatatagtgcaattgatgctgtagagatatgggctgtagagataatatggatgcatcacctgttgattaaaaagctgatgcccgatggcttagcaggaaataggaggtggaccatctgggaggaaaaaaggattctgagatagagagaggtagaaaacatgaggatacacagataaccagccatgtggcaaaatgtaggctagaataaattgatattttaagttttatctagtcagagaagaacctagctatatggccacggtatttgtaaaaatcttttgagtctgagtcttatttctgggagcatagggctgggaggaagaaccaggactaatatctgcaataaactaatatttatttagccaagcaacagaaatcggagtttcaaatgtgcaactatgacatcagcatatttgtttgtagtccaggctagccttaaatttacagcaatcatcagactgttcccaagttgtaggtacagacatgagctaaacacctaacttaatctttcttcaggggtgaaaaacaaagttgagtgttatgaaaaatattcataattacataaaaaccaaaggaagactatttagaaagaataacaataacctaatttgtgtgtaacctcagagtttgagtctatgggattttcggtaggaagtgttagattttggatgtgtggatatattaatggaacctgccatgattagacatggtggattatgcaatcagaaataaagactgcgataggcagtgacagggaagcagctaagtaccgagtgtggtgacagagcagtgtgaacatctctccagcttgatggactgcataggtgcagggaagttgaccagcagagatactttcagacttaggggaaactacagagtaagaaaaatattaataaagaaagtggaacttctccctagggaagctcccagagtgtgtgtatatttgattcagctcctatgtcctggatatggggaccactcagctcttttggggcaaaagaattaacactgtttcctcttgtggggaggtttgtaaagaaaaacatagaaaattggaattgtttttttaattgacctttagcctgatggcacttcacctagcccatagcatgtcttcctatataccccatggagacacatatgttttgaaagaacaaaagtacagtgacacatttacaaagatggctttaaaaatattcttttaaaatttcttttaagactttattttacattataagtatgaatgttttgcctatgtgtgcacatatgtccatatatgtgcaccatatgcttataagttgaatcccctggaggtgggcttatggatgtttgtgagctgccatatgggtactggaaatcaactcaggtccttcgcaagagcagcaagtgctcttagccacccagccatctagatggcccttgactctactcttgaaaagtcctccagtctccgcaccctgtttctgaagcactttgttccactcttggtgtgaggacacccttcctgtgtctgccgaaatctagcatcttaccttcttctctccgctctgtctttggagatggcatgcagctgcttgctgttttctgcttaactgtccttgtatactcaaggaaatcttcaaaatcatccccttgacttggggttttcagataaaatcatttccagtactttattcttccgtgtacatcctattttccaagtctaatcagcatatggctctcctttaaaccatctggattccagaacatgatgctacaatcgacaatgtctggattatttttaataacaataaaaagattgtttgtttcctaagtgatcccttttatgaatcccaccatcctgtttgaattattagactgtaatttttaactgagatccaattcacatactacaacatgaatttgcttttcagtatattgactatcatgtctctcatcagcatctaattccagaacatctttgtcactatgaaacagaaatccaatgcccattagcagtcactctcaatttcttctcctcccatttttagaaactactcatcagttttctagtttttgaatttgtaagtttggacacctcctgtaaacagagccatatacagtttccccctttgcacttggcttctcgcctttagaataatttctttaacgtttaccgcattgtatcatgagttaggacttcatccattttgtcactggatgccatttcttcacatggctgctagacattttgtttattcatgttcacttgttctttttgtggcaaacgatctccattattcccccaggaatactctgttcatttctgtttgtttgtttgtctgtttggtttggtttggtttggtttggtttggtttggtttggttttacgagacagggtttctctatatagccctggctatcctggaactcactctgtagaccaggctggcctcaaactcagaaatccgcctgcctctgcctctcatgtgatgggattaaaggcgtgtgccaccactgcctggctcatcttgagtttttatttatttatttatttggtttttcaagacagggtttctatttgtttgtttggttggttggtttttcaggacagagtttctctgtatagccctggctgtcctggaactcattttgtagaccaggctggccttgaactcagaaattctccggcctctgcctcccaagtgctgggattaaaggcgtgcgccaccatgcccggcaccattttgagtttttaaatcttctttagccctttaattttttattctgcaacccaatcagattcttttgaacctccaatttcactgcttcagatactgcttacatactgaggaaaagaaccccagaacccacctagaatgttgcttatttcatttttcattggtacatctattacattatatatatataacaactccctttcagttgaaagttttcattctcaaaagtctacacagagactcccttgtgttagagaagagaacgtctcacagcaggataactggtttcctaaggtgatccagggagtaaggggtcgttggatggagctgattgatggaagaggccaagttattctgaagtttccccactgtctctggtgaggatgggatgttttctgtacctgaggaggggtcatgtagaaaccctgacttttataggcatgggttcacttttacatagaaagtaaatgtgagcttacaacttgattatgtcattgctggagcaattgtaccccaaatggtatcatctgtaaaatgagataataatgccaacggtttaaataaattaacctatatgaaacatttaacaataatttctgatacatgggatgtatttagtaagttgtagttagcagctttatgtaaagtctaagatatatatatgttatagtggtccctgatatcaaagagcccaatgccctaatattataggcaaaatttatagttaatattgctaaacttaaagacaaattcatggggttgaagagggactcagtagttaagaacattggctgcttttgtagaggctctgagacttacaaccacaggtaactccagtttcagggcccaatagtctcttctggtttttgcagataccgaacatatgaagtacatatacatacatggtggtaagacaatatacacaaaatcaaaataaatcaatctaaaaccaataagaaaatctaaactttagaaaatgtactgaataggtacataaagtatacagtaatattttcttgtctcactttagtaaacagagtaactatatgtaaaggactgctagcacttaataaaaatatttttcttaaatacacactgaagtagaaactttgtgagggctgggattccttcccctccccctaagacacattccttaaattgtccagtccagcattcttggtctgactgcccaatgatgtcttcccactctgaccaatcccagatcttgaccactagaatagtctctaccaggctgttctcctgagctctaaggcatgtttttcaagtatctcctggatgctcaagtcagaactcttaatcttcatgggtaatgactatctctcacatccctatcttgtttagaatgaaagtctttatacagttccctaggccacaatttgggggcacaatctccttctttatatctctcatagtcatgtgtctatgtgcgctctctctctctctctctctctctctctctctctctctctctctctctctctctctctccctgctttgggatcccctcctctacagagactctaatacattttttattatctctgcctatcccaaggccttttttagaatacatatgttttcaataaatgtctgataagtaggaattttttttctatacctcttcattttatattgaaaggacactcgcatgtgggtgcctgtgagcacgtgcctttcacagcctttcaagttcgccaactcttgtccagctcttcaaccctgggtttattagtgagattgttatatgatctaagccagcaggcatgcatcattgtttagggggtatagaccgaagactataccataatgcgtaattcttttcaacaagttaagccacacactcaacagtaaacccttctcaggcatttctcaaccactttcccttctccttttttttttttttaaatggaaaaataaattaggaaaagacagaagatcctacactaagacattgtcttggccttgctgaggatacactctggattcccagttgtccattttccatggtgtcattgcatctggagaacaacaaacccctgagcccagccattgttcccgtggttacggttcatgctttgctgcttcctggctgagaggaggcttaactgacaaagccgatttctatagctgtgctgatatcacccataattcagacccatgctgaaaaaaaagtgacaattaacctcagccacatttcttgttattgtttttattgaaaccacccaatcacggacaaagaaattcatgtttgccaagtaagaccaaggaatcctgctgtagaatgaagagaaagtttgtgaacctacggagagtaagtaagcttatttaaagtggcaaaggcaaatggctgtttccttttgtttctgcaccgcttgggtttgaatcactcactcactcactcactcactcactcactcactcactcactcacccactcagtgtcgcccttctcataccttcttctgctagctgtgttcccatccagatgttatcctgaactgatctgactcttgcaggactcgggtgattctcaagaacacagttggataaagtatcataaagacagcctttcttcaaggtccagtttcccacattctcagtcacttcctttgtcaacgtcgtgttggttggctcacaagacgccaccctgcctgcctctgctcaggttcctctcctatctatgtcttcccttagcttgagcaccaatcagaattccttagtctccagcttccatattacctctgctgaaaagcctttcaagtttgcatcagcctctctgctcatagaagatccagctctctgagcacctagtatgtacagcacgtactcaggatttttaagttgatgttcaagatcaggttcaaaacattgtccctaacacccatggaaggagttacagagacaaagtttggagctgtgacgaaaggatggaccatctagagactgccatatccggggatccatcccataatcagcttccaaacgctgacaccattgcatacactaacaagattttgctgaaaggacccagatatagctgtctcttgtgagactatgccggggcctagcaaacacagaagtggatgctcacagtcagctattggatggatcacagggcccccaatggaggagctagagaaagtacccaaggagctaaagggatctgcaaccctataggtggaacaacattatgaactaaccagtaccccggagctcttgactctagctgcatatgtatcaaaagatggcctagtcggccatcactacaaagagaggtccattggacttgcaaactttatatgccccagtacaggggaacgccagggccaaaaagtgggagtggggggagggtatggggaacttttgggatagcattggaaatgtaaatgaggaaaatacctagtaaaaaatatttaaaaaaaaaaaaaaaaacattgtccctgctcttatttttgtaaaaacaaacaactaggggatctgtaaaagttattttaagcatcatcagcacatataggaaacacaagagaaaactgtagtcctttgaacaggtagtcatgctgttgcatgatctgcagaagcatttctgtggacgttgtaaatttaggggggaaatgtgccaaacccaaaaggcactgggtagagacagtaaagtaagtgtcttagataccactgaattatttgcaccaatggaggagcagtgaatggcatacaacccaaacctagttctgcgggtatgtgtgcatgcatgtgcctgcatgcatgattatgtatatgtgtactcaaacataactataccacagctcatgtgtagaggtcaaaggcaatttgcaggagctggctctttccttccattacatgggtactgggtattgaactcaggtccttaggcttggcagcaagcactcttacccactgagccatccttctgacccttcatgtatacttgctacatgttttaaggtccctgttctgctttttttcttacttatccagattcttagtaaagttaccagttgcttgttgaagtagaagcatgctgagagttaagaggcaggcagtttacatttctattcctatgctgtaaacaatctccctcctggctagattagggtggcttctacagtcctgcgaacccaagcatgaccgtgggcttctaatttagatactgttctgagggaatcatgaccaaatcctcttgccagctgatatccagaaccatagttgaagattgtgcccagttctgccatttctaattaatgtggaggagttcagcctagaggtggctgagagttcagccacaaaggtgattaaaggattgggaaagaactatgagggaatttaaagaaaccgggattagtctgcatggaaaggaaggaggataaagggcaatttaatatcagtgttttctacctcacctgaggaaaacataccagtcttacactgcagtatgactgggcacagacattgagaaggatcagctgacaggcaaacttgacgtgaactattgagaaaggatcgaatttccatttcatgatatccatccatctatccatccatcatccatccatcatccatccatccatccatccatcatccatccatccatccatcatccatccatcatccatccatccatccatccatccatccatcatccatccatcatccatccatccatccatcatccatccatccatccatcatccatccatccatccatccatccatccatccatcatccatccatcatccatccacccatcccttcatctgtccatctatcatccatccactcatctatcatccatccctccctccatcagtttttttttagatgaatcttactgggcatgctggtatgtataatttcagtaattttttgaggtaggacagggaagggggaagagtgtgagtctaaggccaccctggctcacagcaaatagaaagaccttgtctcaaaaaaaaagaaagataaattctgcttaaagatgatggtaggtaattgatggcttcatggaatcctgtctgtttggtgatgatggtaatgatgttgaccatgatgatgttgaccatgatgatgatggtgatgatgatgcagcaacagaacttgaacctgggaccctgtccatgctctgtggtaagcagactctctaccatagtcatattcctagatctgcattattattttgagaaactatttttaagatttatttactgttatatgtaagtacactgtagctgtcttcagacaccccagaagagggcatcagatctcattaaggatggttgtgagccaccatgtggttgctgggttttgaacttaggaccttcagaagagcagtcagtgctcttaaccactgagccatctctccagccccgagaaacttcttcatggatagccatgtacactaatcaaatgaggagacaatatattatagtttcactcctatagaattgctacacagatattattctgctgtcacagtgacaacaataactactaggcttcattaggggcctactctgtgccagctaatgctttgcatacgttgtatctatactttacagtaaccctctgtaatgattccatcttcattttatagataagagggtgagacatagtcagagccaaggtcacccaaactagtaagtagcagagccagaatgtaaacttaagcccaggtgccttagctcaagtgtccaaagcccataatcttttgcagtataattttctcttccccattccaggtgaggctgagcatctctaacctggggacctgagttcagaatcatttactgggcatattacaaagtattgacatagtgggaatgttcactgtttctagtaagtgtttcatacattgcttcattgattctaaaatactattattactaagattgaccttgttctcctgcctctaccacagtatgagaattttgtgtctatacctatagcgtctcctgccataagtagactctcttaaatgcatgtgaaatgacatgaatgaaggagaacctaacacacttaaggagtttaattttaaagcatccaatatgatgagatggcctctggacacagtagtctaggctgtctggccacagatcagatgcagtatttatgttatcactgcttcatgactgggtctcacatgaaatgtgtcctttgcaaagtgaaagaatttaatgcagcaagttcccttttatccatcctttgcctccgtagccatcgggacacagcgaatgcctgggtacagtatggtttctctgggtattgatctggaaacctaggaactagcagatttagtaaggagatctaataatctctaaaaatactgtagacattccaaatttacagagagcttctagaagtctacttgtttgtaagcccctaaagaccttaattatagactagctgatactaccctttgttggtggacagagttggcaggcatatttagacatggcattatatttgtgctcttatataattgaaaactcacttgttaataagctcctataaataactgagaggtagtattttcttgtgtattgcattgtatatatctgaatcttttgtgtcaacttgtggttatctcactggtcaagctaacatgatttattggccatgaatagagagctaaatccctactaacctaattgatgtgttggcctgcctatagaattcttggcagttagagtttcttacaaaactttgctgtggtgtcttgttccctagagggaacattgcactttaggatagtatgtgataagaaccaagatgatgaaatatgttttgagactttgagacaattctcagtgcagttaaaactgcagttaattggtgtctatagcatagtcatctgcattataaatgacactttcaaagtcacaggatgaggaagatatactaccagctgtgcacagctactttcagagcagtgctatctccagggtgttgggagaaactagacttggtctccagttctaggttcagctgaattgctttgtcttatactgaagagtgctcctatttcagctggtctgtccccttgtctccagacaggtctttctatacatagctccactgtgggactccctgtaactttttagttagacagttcttaaatctgggtacagagtcaaagttgtatcatagatattatcttaatacaccatctcaagactgccatagctaatgactaatgatttaggatttcaaaaggcgttcatgaccacattctgggtgccatcatgggtctggccaccttctttgtctcatgctaagattttagcttttgactaagtggaagcaactcatatcttttgtagcacgctagtgtcatttttttcctctcttaaactttttttttttttttttggagggggggaactttttttggttggagtcacagggctgagaaaaagggacaccttgcctggagctagctgaggggtaacaaaaggtattcaattctacgacaatcttgtacaggttttctcattcagtagagcatatgttgtgttagtttaggctttttgtttgaaagtttaaaaaaaaaaaaaaagactcaccttggctgacttagcagcaaaagaataacactgaatggatctggagcaattcctactactaggatgaatcaaatccagatgttttctacctaagttatttagattctcaagaaagcgtttgagtggctggcttggattataaacctacctcttagacagtaaatggcctcataatcttccaagatattcttaccagcactgaccacaatgaatatagacaccaaagcccagactagaatcttctcacctgaagaaagatgaagacacttgattcccactgtggagttctgcagtgaggagaaaattcagccttttggagccagtggttgtacagaggctccgtctccttagcaactgcctaaatcctcatcagtatagggattcttggttgtgatttagtgtcctttgcctacattgcaacttgacactatagatcaacaatgaacaacatgtattgttggtcatcagttatctggaataaaataaatgctgtaaattctctgaatatgatttaacaaccaccattatcatatatagaaggccagtcatcagaggcaaatagtcaaaagcccgacccagttcgtgtctcactttggagttgtgtagaatgatagaatttgagggctttgactaagtaagagactaacttcaaaagaattgagtgaggatctttctgcttctatgggctggaggattttgaccagaagccgggttgtggatggcagattctaataatagagcaggtttaagaggtgacgcactgatttggaatgccttctcatctgtgtttgcttaggactgaatggcctctctcgtgcttcctttccaagcagaggaccagctgggtctcactttttttctcttaacctttgctcctgacttgtcttttccctaaccactctgctttccttcccctgacttctgttttctctctattaaatcatttctctatatttaactcctgcgactttttcccctttgtttattgcttattcggtaacttcagatcttttccccaaagttccctttctttttcctcctctaagccaccagcataccatcccccccaccccccccccacaccaagctccttatttctttactgcaaatccccagtgtgtttactgacctgtgtgccaaaaggaaaattcccaggccacctccatgccaatgcaatgaaaatcagcagctgccattgctcaacaaggtccttgtgacctataaatcaatggctaagagcccttgcagtgaacggtggcatgtgtgtgtttatgtgactatgtgagatacatgacagtgtttgctgctttggggaaagaacctgaatcttttctgataagtaagagaattaagcagaaatttttgcctaaatcttttggggttattgttgttgtgttagtggatgagagcctaagaagttgtataagagaaatgaatgacattaaagagagaaacagacacacaagaccaagaaataatcaagtctagaacatcttactgacacactattgatagcacactcacagtaaacatcatcgatgccttgatagggcagaaagatctggaaataaaaaccccagcgattcatctgtttaaacaaaagaaaggagataatgtggagaggcagtgaaatggaggctgagatgagatgtgagtattgaagacacacacatgagaaagccactaggccctaccccagtgtagcattgcaggtaagagagaaaccggaaagcacacttgccctgctcagacacactatctgcagcacattaagcatctaaaagttaatgataccagaatagtatcttcaaaaaaaaccaaaatcgtaaaacagaaattaaggccccagtaaaacatttgggagaatttgaatagatgtagcagggaaccagaaaataattcaaaacttcaactggaaaagtgattttaagttgtgcctgctatgtaacaactggcaaaaagagagaagggaaagggagggaggaagagagggagggaggaaagggaagggaagggaagggaannnnnnnnnnnnnnnnnnnngcagacatacacagtgaagctactctctataacaaattatgatcaggatgaccaaaatttaataaagatataatcccaaaatcaaaacaggaaagatgtcagttcaaattcaaaggcagagatgaagaatgacttcagcctttttatcagcagctacaaaagccaacagaagatgaaacaaaaaaaaattgcatgctgaaagtaaatgaatgtgaaccaagaaagctatgccctgcaaaagttaacatttgaaggagaaataaagacaattcaacacaaacacaaactaaggcaagtctagacaatcaggaaagaattgtagaaattcttaattgaatattttacaaggaggaagagcaatatgtcctcctttgccttttcccataatacatgaatgtgttctccataaaaacatcagagaagtaaaatagagcttggaacaaaccaactatgtggaacatagaaatttggagaagccccaatattaacctggcagaaagaaattagaaaaaaaaagaggcaataatccagcaaaacagaacaatatctcacagatgtgtaggaaatagaaaatttatttctgtattaactttatatacagatggtttcaacttaccccaaaattgtaaggactgatagactgggcttagacaagaaggaagggaagggaagggaagggaagggaagggaagggaagggaagggaagggaagggaagggaagggaagggaagggaagggaagaagggaagggaagggaagggaagggaagggaagggaagggaagggaagggaagggaagggaagggaagggaagggaaggaaaagagaagaaaagcaagatggtgctgtatttcctgagttgtgaaaccaacctgtcctgacagaagaagagaaccgccccacacaaacacacacacgtacacacaccccgactgatggccaagcacagtgtgtgtacgtctaatttcaacctcacagttaaaagtgaagccagggactgagaatactatccactgagagaaaaaaagcagaggggattttctgagccagatccaaaatcataaggctcagggggaattactttgattttgtcaagtcagagcacatagccaaaggcagcagacatgggatattgtcagaggtaaatcacccggctaggcctgctctgtcttattgcaaggtcagaggagcacggcgagccggccaaatgtttccaaccatggaaatcccctaactttccaactgctacagtcccacagctccgaggctttactcacagcagggctctgttccagctttcaaagctctccaagttgattaatcattttcttgttctgactcattcaggcttctagaaaaaaatagctaaaggtactagatgggctgggtggatcagggaggtcagataaattggcttgatgttagtctatacaaaaacctagaagaaatcgccaaaagtctttcggcctaccatcctccagtgctatgtatggtttggggccaaaggccattggctcgttccatgtgtttaaagcagaatatttctgtgtgcattagcaaacttgggtatgcgagcattcatttcttaatgttaaggtaagttattataggctagtaacttagaattaggattccatttgtatctatgcagatggactgtggacccatgtataagcctctaacaccgacaatgtcaaacacatatacagtgtttattatttatcaggcactgtgtgcttttaccaagagacaagtttacagcactgaaaggtcaattttgatcatcttagccaaggccatacataatgattatattatttggtctggctaatattccccaccatgaagcttatattttaaaaaataaattgttttagtttatgattatattgagtcatactggaatgtctgcttctttgcttttgtaacacattaatctctgggcttattcattgagttcatagacgcttattacgcacctgagtgtactagtcatcagagagaaaattgtaaatcctaagatgccacctcagacctgaggacatacactgtgctagtgccttttaactaagcaaacaaaacacatggagaaacacagagcatgaaacaactatttctgcaaagaaaaggagacagtagaattgggaatttatgaaaaatctgaattttccgagtgttaaggttggaaggaacagcaccatcatagggaatggtttgtatgaatgctgaaatgtttgaaatggcatagcatgctggaaatagaaaaataatcgtagagtcatggtggggagctgagtgggttaaattaaacggagatggtgatgggccttgggtagaatactcagagttgcagaagagctcatggtagtttaaaagaaagacaacaactttattggattatgtttcagaaaaagaactctgaagataatgtggaataggtctaaaggggagcagaggccagacagaaagcgtctgtgtgtcccctgaggggtagcagcagtgggaaaggagaacaagatccaacacggattcagaaagtacagaggggagactgcagtggggaattgagaacagaccatgatgtttgggtaatccctgggttaaggatgcggtgcctaggtgaagctaaatgccatcaacaaaaaaatcctgaaggaaacagtcacagagagtgtgttgagatcacttggtaacacgttcagtttaaatgatggcacagattcaagagaagacattgaggtccccttggtaaccataccaagatcaagagaatgaaatccctaaaacacgtgaaccaggacagcttgatcggacaacagagcataaagccacctaagaccgcagattataatcagtaagactgctatcaagggcccttcatgctgtgggagagtttggggaagtgcaaatggggatactttttactttatacctttggatcctgttctttccctacacatgactaacggcctttgtaaagaggcttaaaagtctctgtcaaaggctagtaggctaccgacccctttctaggctgttatcttgaagtctgttttagggaaccgttgggggccatcccctcaaacacataaacgcatgctttgcttagctttcccccattgacctgcactcccaactgctggtgccatatagatttgcagacatctgtgccccttaactaattgcagcaatctgttctgtacatctctgagaaagcacacaaattgattccccagcaatgtccatatccaaggacacctgtatgaccccccctccccccatcaaatcagctgccccttcaccttgtgttcgcctgctatttccattatggggctagtaatagatcagcctcaaaagtccctgtcctgggaaatttcttcataagagagttactggaaacaatattttggctgtggagccaacttgtgggtttaaatatcttccagccggcagaacacctggatttaagtgtctagtcccttctgactctgaagaatgagctgtaccttaaattgaagctcataagcacattgggaaatcatgagtctgtttcctcctgctgtttgctgaagcaatgaaaagtaaatgaattcagaaggcgcagagccagtttgaagcgtcacaagcaggggccttacagtgtgcaggggtgtctacactttggctttagtgctgtgtgcacaattaccttgtgcaggctgctggagctggttccttccctgttgcaatccttgccttttgagaaaaaaaaatcaacttcttgtatttcatgctgaccctaacatctagaaccttccgtgtaagaattttatggtgactatctatctgttgactggttagattctctaagttgtgaagggtgaatagaatagacttctgaccctcttgaattcaagcagtccactttatacctgcataggaaaaatgcatggccgatggaggatcacatcctcacagctatgaggtccagtgatctgcaaatatattttaaaattattttgtgtttatgaatacattgttgctatcttcaggcacaccagaagggggcatcagatcccattacagatggttgtgagccaccatgtagttgctgggaattgaactcaggacctctggaagaacagccagtgctcttaactgctgagccatctctccagtctgaaggttagaatattttcctcccaagaaagcagttagcagtgatttccttccatgtcttccctccccccccccttcctcattccatcctctagtttcaaacttccaatctgtgcttctaaggatttgaattatttctacccactcctagctattaaaaagtattactactgtgaatacctgtgtgtaagtttttacacagatacatgttttcattctcttgcaaatatagctaggaatgaaattattggatctgtatgttaactctgtgttttgacatgttgaacaactgccaaattgattttcagaatgaccacaccatttcacacccaccccggcaatgtaagaagattccagtttctccacctgcttctcagcaactcttattgttaattccatacctagttattattgtaaagtgatatttcatcgcaaggtcaatcaaaacctttatttgtctttttacacagaatagaatttaagtgtcctgcagaaatgttactgatagattgtggtgatagttactcatccctcggaccctcggcctgatctcaacccttaacccaaaataacacaatgccacctttatgtaatatgtccctgggctgtggtctgtggagcacctgcagtgaatttcattagcctgatggatgcttgttacaaattcagattcctggtcacacaaggattcatactatctgggggtaagagtgtggtatataggaagttacacagctatgtaaaaataagcaacatatgtggacccaaataccgtgactaatgcgccctcattataagcttaagacttttcatcttcttatttacctgttgaattacaccaaaatagctaaaaaaaaaatttagtgaaaaaccaagtccttaagtaaagtgtatgaaaggtggtagaggtaggggtgggggacaaaagtctttaaaccagccacactgcttagccatagtttctcagctgaccggtttctgcctgagtggtatgggggaaatggacatgacgatgcctatggttcttttcagctgtaatgaagttgtagcattttgtaaccactgttagaagatgaggcttctgggagagctttgacacgttaccaacaacaaaacaataagcatttactgagtagtcatgacatgcaatgcaccgcgctggcgggtcccgccacgtagatgactgagctgcatccctggccttgtggaatccagtctccagaggaactgtatcttcattccatatacaacaggattctcatttgaagaaagtgcctgtaacttctctgtcgcttcccttgagagcacctggaaggtatggtggatttgcactcttcctgtgaccatttggtctcctctttcttgattttctttctcaggttgccatagacacttggtggtgctgagtctatgaagatgttctactgtatctgacaggccataagagcatccaccaggcatctggaagcagcaaggcctttttcctaagtgtgacaatggcatttttcagtagtcctatctgcctttgtcagcagaagtgttttttagggcccccttattatagtggaggccccatcttacaatgataaagatgacttgggtcttcagttttctttatcagagaacagcctaagggtgtagcatcttcaccctgttcttttgggtgaggtcaagataaagctgggctagatgagaaggtcgtgtggtagaatgcttgcctaatacggatgaacccccaggttggatcccagtgccacatacactgtgtgaggtagttcatgcctctaatttcaatagtcaggaggaacacagaggatcagaagttcaaggtgacctttggctactccataataagttcaaggccagcctaggccacatgaccctgacaagctctcttgtcacccgtctcaactagcacataatttcagatcaaaagctttagcccatggaatttcacctcgttggttgtcttgctcaggaattataggagtgtttgattttttttttccaggttaaactatcagagaaagaaaaagtcattcaatcctttgtttgggtatgttgggaagagaaaccaagaagggaatgaaaaagaactgggcttgttttctcttaggcactgttaaatatagaggaagctacattcatagggatgtattggccatgaacactgcccaggctgtctgggcttcaaacccagctatctaccaagacccttttccctgtaattttcaatgttctcctggtaccctaagaaacccaaaatgtatgtgttcttcacactgctacacagcctgtttttcctctttccttttggtttttctctttttgtaagaaaagaaagtacagcctgttcacagtgtcagttgcagcattgtgataaaaagttcagttttatctttttggtccaatctaatgaatgtgggcaccatttatatttaaattttttgagttctcggatattattttacttttaaagtatttatgtatttatgcctgatgtgtgtatagaggtcacaggacatgtttgtgaagcaaggtctctccttccatttttgagttatagtgatcaaacttggttttctacacttacatagcaagtgtctttaccggctcaaccaccctgcttggcctcagttttcatttcattttattttattatttttaaacttacatttattggtgtgcgcacatgtggaggacagaggacccttcgcaggagtcagttctccatcgagtgggtcctggggttgaactcacatcgtcaggcttggtggcaagcagatttactcgcggggcattctcaccagccagatttgactttgaatgcagcgcgtgtttcagttccctccgctatggcactgcagaccagccagtgtatttccccctctgtttccaagaccatcacatgactcctgctcaatcatctttctcctcctgaattctagtgtccagaccacgctctatcttttgggagttatgtaaccttgggcaacagcctgggttgcctcgtctgagggcacttgtgggttgttaagaggtttgctgtctggcagtagcctccctgtctcaagctccccgccgtgggtccatctgagcacagctgttggttctgtttgtcacctcttcgtccctgcagcttctctggtttccaccacttgtcccttggcatctgaggcccttccagcaagctcacgctgctctctctttaggcctggctcttgccactccccagcatcaacgcctgtcctccagccagcccagactagtcaacattcctaccaaggccttcactttcttcagttggctcagcccattctgccttcacaaaattacttcttttcttggctcaccacaatcccagcacccaaagtacccaccttaagcatcctaaccaaggaccccttggatgggatcagtcccccctgaacacctagtctttgctgagatggcacttgtcatagattacctggaaagagacaattagacaccttgtttccccttctgggttgtagacctcttgaaggcaggaagtctactttctgttatatgtatgctcaaaaagtatttttgaataaatgaataaagcacctttgtgccctaggtttgcctctgacagcttcctctaatgtccagagcaagggaggcagatgatgtaatcatcaggatccggcgctgcctccacttgctctctgtctctcgctcgctctctttgagctggggcttttgctgcgctgctcaagctggtctcaaactcccagatttaagtaagccttttgccttaacctctggtgccgtatatgtgtacttctcctccagctacatcaacatgtatttttgagtacctgctaagtgttagaaactgtgataattgctagggttaaaaaataattatggtctaatttactgagtcctaggtgctaagcactgtgctaagtaattttttttaatcatcacacgtaattctcatggcaaccacacgaggttattattgtattatcaaggaattattgtgtaagctgtaggtcaaagtagttagtaaattgcttaaaaccacccaaagagacaataaaaaaacctcttagatataggatatggtctacccttgaagggcctgactttgggcaaggtggtccaccaaggctaaggataaccctgatgccaactaatcctcaaacttgacaggacatcctttcccaaagggctcaggccatgcattttgaaaatgttttaaattctcagacaggatctcactgtatagtgtttgctggactggaacttatgatatagccctagttagcttcaaacagacaaacctcccttgaccacctatcaaatgcaccacggtgcctctaagatgtattcttcaggattacctacagtcctaaagctgggatgatttattccagacattttaaggctaatcagtactgtttgccttctagtcactcagggctttgagtcatatgataatggcgtttcttcttttttgatgtcgcccattgtcttgatgttataaattttaatattcttattttcggtatgataagctatagtttgagaaaatagaaagatgcccagagttctcatacctgttttctgtctggaattctatcttcaaggtgattaaaactttagctttgaaaagttctaaggaaactagtttctttttcttctcctttctttccataaagcactgtccatacttttcctggtatgagcttccttgtattatgtagactctgcgtaaaccagctttctgcattgttttgttgtctacgcttatctttttccttaggtcatctagtttgtaaaactcacggcccaacatcactattaaattgtcatggctcatgctttttgccgtggctttgtattttgtggggtctgaagcaaactgaattttttctttttgatctgggcccctttcttcctggggaagttgggtctctcgttattcccttatttattgctctgctgtgggtatggtttagaggcttggtttttattgctctatggcaatcaacacactatacacattccaggttcctggtccctttacatatggacacacactattccatgactcagacagactataatgaatcgcctttatccctgggtatctgaaatcctgggttgctgtgttggtctgttcttcctaaacacagagccaaccacaatgcctgttgtaaaccagcactgtttgatttcttctggcgtttcctcaccatgggtgcctctcagcctaattacatgttgatttgtaatcaacagaagctccctctcatttgatttcatgctgactctgtatcccacaggtccctccacacacaccatttggaaacctccaggattattgtctcaacttcagtttcactaaacaggtctcctttcatgatggcctgcttttaatctgttgcttttctgttcagttactctgtcaacccaaaggtatctgttgtctatttaaaaacaaacaaagcacagctatatgttggtgggctccatttgtctgtctgaagtattagggaaagtgccgtcattaccacgagctagtccagtgcctacttctctctctactttacaataagatacccaacctcagaaaacagaaatggtctcaaccagaatcatcaatgaagtctgatttagataacaatgagaattcatcaaatacgtagaaaatatgtttcctagagaatctagcctttttcctgtatttgggagtggtgaagaatatacccaagaacttggaacagatacagaatgggtgaacaaccagaagatctgccgggcaagacttcctttctccctgctgaactttttcctgttattatctctgagatgaacaaatttgcaaacagaagctgccttggtattgtcttttcttgacagaccgctgtgttcagtgattcctacagcccagagtgtatgctggacagttggaagctttttgaagccgttgtattgttagggaataattagggtgaatgaagcagggagtaggggttaacagcaattctttgttgtaagcaattgctagtcttggcatcaatattagtaacaaggccaatctactggaaggattctaaacaaaagatggaaaggttgcggttggtttgtctaatccagccagtaaatccacccatgcatggccattgtaccctgtgaggtctctggaaatgcctttggtcacactgcattccaagccactgggtgggtgatctctgcacagtcttgtacatgggtttcctagaatgcttcccatatggaaaggggatgcacaggtgttgccttggcaattaatcagcatactgcacaaagaaagtagtctccggacattgggatagatgaatgggtatcttatgaaaggctcatgatcttttctgtggctgaaggagtcagagaacgccctcatgcaaagggctggatgtgtctattgagactaaggcaaaaaagcacctaggtaaaccgatgacctgtgttctcgtcccttctgcccgctccaggccagctgggcccagtcttccattcatcatctagtccagcgaactaaggtagctagaaacttagtacttcccagacagtcgtggcagtctgggctagagatagagcagttgcttagcatatgtttagcccacagcactgaacacaaaaccaaacaagccagatagtagctcttaacactgaatgtctgtttctcttcacccatgtgggaacctggagctgatgtaaacactgaagccaatcaatctgcagctctggttgatcagaactgtaatcaatacacagcaatagtgccttgcataggggccctggagtcctgcacagagcctgccaatttcatttctaccaagtgcatggtattatgaaccctactcccaaatcaactttccaccaaaggtccccacaaatcttgctttctactgtcatccaaaaggatggagatgctaaggagtatagaagtggagggagagatgtctccaggaacacttatgatcttagatacatatatctaaaaggcaaattcttgcctcaggtgttgaataggagtctaatttcacagtctgacttgggcaaaggatgactgttccagactggtattgaactccgagcactgaggccaaggtgatttttcacctgtatactcttcccagaatatacctgacgtcctgtctgtgtgtcaggaagagtcctgtgtgacagggatgggggagggaggagctgtgtgagaagagaagtggctgggcagcagtgggcttgttttcagtttctcagctgctctggaaaacagccaaaatgaatgagatacaacaagccttcggtgttattgtaagccacagagaggcaaggcccctcattttaaaaagctctgtagagtttaaagtttcatgtgtatttggtctggggcaagtatagccctgaacttcctccaggaaaaggttctattgcaggagcgcccaaagggccccgcctccctgggcagatagtgacttgatggagctaaagcagtgtagcatcccagtgagcctttctgctgtttggctagtggaggaagattgacacaaaccttggctagccctgtcttcgtggcctctagaaaagactagagaaaaatctgtttgtcttagaaagtggatggtctagcagaggggagaaaggagagggctagatcctctgggaccagtgtgcttgtgtagtgtacacaacacgacacccagggataccaggcaaagctaactcctggcattctcccaaaggatggacaagctgagatgttcaaagcaggtcaccctccatagaggaaaagctcacgagcctgaggtggctgtgagtcgcgtcctgccctggcagtcatggtcatgttccaggcttgatggcgcttcagtgtgactcttgtctgcagttcacgtcagtgggctctcattactgtcttcctaagtcctgttgacatttgtaggcagagaagaaatctggataaggaaaattcttttcttgacattgtttaaaagcattactaaaaaaagaacagacagtattttcagagctatgtggaagcaatgacgttcgtggtcagtgtggaagctcaggtgggtagcttggtgagctgtttcaggccacagccatttgtgagcagcctgggatgttctgatatggatacgaacacattcatacttcagtggccacctttttcttcccaagactgtcttttctagcatacagcttttaggatttttctggaaaaattgcattgtattggtttgtgatgagcttaagtttccaaagaaatcctactggatcctcaagactgtttcgtgtaaggggaagagtgggtatcagaagcaagccatctttttatcttagaagtggcaggaggtggctgttcagtctacagctgacttatctgtgtatttacaaactgcaactgaggacagcgaagtggctttgcttgaagttacacagaaagttagttcaggaacagcaaagaaaagccctgcctcctcatgcctggcttgtcatcacaatgtgagctctgtccagaagaagggaattcagtcctgttgctttaagaaattttgtgggccaggcagtggtggtacacctttaatcccagcagattaaaggcagaggcaggcagatttctgtgagtttgaggccagcctggcctacagagaaagttctaggacagccagagctacacagagaaaccctgtcttgaaaaaaaaatattgtgaatatgtaagacattgaagtggcttgtcaaggtgggctcgttatcctggatgaagcataattttaaagaaatgtatttggaacactctaattttaacctatgttctaattctagcccacagaatttttgctcaaagtgcccccgcatacattttgttcgagcagaccctcaaggcagttttgtggaagtaggaaagacacatctaagtacagctgttttccagaaacagaactgaagctggaagctgtgtgtgacccaaccacactgctaggaagctgctgagcggggctcacgcccaggcgtgcaggccaagcccacggcttatctcattgccccaccatgcgtgttgctaaaatgatgttttaaaaagcagtcccttttcctcatcttctcctgcaacggctacacttttcctgccctgcccgagacagtgctgccgtagccacaccatttaccatatgtggagggaatgggccttctcctccgcgccttcacttcagacccagtactctttgcttccccttcagatgtgaggggctgctggggttattggcagtgtctcactaggctgccagcgttgaataaccttcatttaaaacaaaaacaaacaagggaacaagggatagggaatttagcaaagttcttggctcccttttctggctcttcttgaaacccagcatgcattgtcaagacgtgctgcttgttttcacactgaacgctaggtggcagggtggccacaccactggctgtggtcccagggacaggaatgaggaggcctagaccatctgtggcttggggagattaggctaaccaacctggctgatctctgcttgacagggaactgcccgcagtgagtctgaaacatatgcttccaagatactgcctttaagtttccttctccctttattccctcagcccacttgcagtttaatttttctgccccattgcattctggtagtagagggcagacactgcctgccagcagctgcctcgaagggcagattgtgatgggagcacacagtggtgctggcactcttgccttggcatgtcatttgggtcatgggtgtctgaaggtaagaccttcccttgagttcattagatatttctcagagggacagcagactgagcctgaagatcatagtaagccattaccctacgatcactcactgtccccactaactcagatacgctgaagatcacaaaaacaagcaaacaaaccaaacaacaacagaaggcagatttttgttttgctggcatggcgccatcttgattctgctgtgtagctagactggcagagctgccgtaggtgggtgagacatggcttccagtttttgttcttgttttcttacctaatagtgtactggggtctgctaccctggatgcctcgcaggccacaggccgcaggccacagtaagctaaataaagcaccagtacaagttgtgtcctttcatgttgtagagagcatgaactccggttacagaaatacttctctggatctttggattttttttttttttctaagaaagaagaaacaccattaaaacaaaacattgtgtaccaactgaggatagcaccctgacagtacccaccttgagacttcagttaaaaaaaaaaaaaacaagtctgaatgtagaaaattgatcaaacagaaagatttcgttttaattacaaagcattctttcctcacagctgaaaccacaatcagatttcattaaacagtgagtagtgagttcctgatgtggattgtaagtgactccatcgatgagaattaaaaaaaaaaaaaaatagactgtgtaagtcgcaacttttcaggaactcacttgttgcgtaataccaagaaccaagtgtctttgtacaagaaccaaaatcactttgtacatattcttacatcacgacctaccatttcccaactggggaacccaaagcattttttggttttcagctaagagtcctgataaaatcctaattttgcacatacagcgttggtgacactgaagggcctcgtgaatgtgaccaaggtgactcgtctacaggatagttctgtagatgaaggcccaagtgttctgctgattcagttgcctaatggactttcattaaattcagcaatatgacttttgagaatacctcaaacaacgtacataaagcaggccaaggatattaattgcaggctttgaagctggaagagggtggtgagaccttctccttccctaagaaagaaatgtcataaaaattccaaagcagagatcaaatttccagggggaggggcttctttattgtttcctctaatagctgctcttgagccttctagagtgctgtgtagattagccctgggcagggactaaacaacagcttggctttgccccactctagtattttgcacccattttgaatgattaatttatgatatttttgctcttgtcggtcctttcttttattccacctcccttccctccccctggaaggtctttatcttcacacttttccaattaattggtttcctttgcccttggaaccacagtaaatgtgtagtgggtctttacggggggggggggggcttcattctgtggatcatgctttaaagtcttgggactggagggatggtgaaaatgagtcacagcttgtttctatatttgcttctgtgtcaaggggtgtagttttcttactacaatgtctgctccatagcttacattttcagggaaacaaaccagaattcagtcagttcctttaatgaaatgttttcaaatactacagagttcttggcctctgtaattccacactgaacagcacagtgatggcggccttagtatttttctcccacaggaagaaaaaacacactcaaaataggnnnnnnnnnnnnnnnnnnnnnnnnnnnnnnnnnnnnnnnnnnnnnnnnnnnnnnnnnnnnnnnnnnnnnnnnnnnnnnnnnnnnnnnnnnnnnnnnnnnnnnnnnnnnnnnnnnnnnnnnnnnnnnnnnnnnnnnnnnnnnnnnnnnnnnnnnnnnnnnnnnnnnnnnnnnnnnnnnnnnnnnnnnnnnnnnnnnnnnnnnnnnnnnnnnnnnnnnnnnnnnnnnnnnnnnnnnnnnnnnnnnnnnnnnnnnnnnnnnnnnnnnnnnnnnnnnnnnnnnnnnnnnnnnnnnnnnnnnnnnnnnnnnnnnnnnnnnnnnnnnnnnnnnnnnnnnnnnnnnnnnnnnnnnnnnnnnnnnnnnnnnnnnnnnnnnnnnnnnnnnnnnnnnnnnnnnnnnnnnnnnnnggaacaaaatagagagtagagctgggggtctggaggcgtttgcagggggaagtaatgtgggagaaacacaatggctgccccagcacaggactgcatcctgggatcccagcacttcactggagtaggcatgagctgttagaggtcagcttgccttgattttttttttttagcataaaaaagccaatgactactcttgagtgtcagtttattgagctctctagcacagactcataacttctattaattaggggaaaaagccttccagaggaaagggaaatgccgggcaaatacagttgactttgaccagttgtcaagtccctgctgttaggagtcatggacaagtccttgattcttatttgacagagccagggttgggggcgggaggagcagttcggcttctgtacacttttggagaaggaacttttttcctccaaaccacattttgttctggacttaccatccctgtaaggtctcgcttactatggtgctcccttcagtccaagcaccttcaggagccttcttaaaattccttcttaaaagcataaggtaaaagtgtcaaacttgttttcctagacgggagtggagctggagaagggaccaggcccagtccttttgctattttagatgctggtaaataacttgaaacctgttaaagcttttaaaggaatgtggaggagttgtccctttgactcttgtgtttcagaaagcaaataaagggaacaattttcagaaaagagtcagcccttcatgggctgcattcttttcagtaccttgcaaatgtcacatttgtccctagaggctcacaaattgattcacttgtctccatgtcttaacaggttcaacatccttatccactgccccaactgatttttttttcagtttagttttgtgtgtgtgtgtgtgtgtgtgtgtgtgtgtgtgtgtgtgtgtgtgtgtgttatccttgtccaaaccagccatttaaaaagtaagaagtaccgcttttgcgagagaatagtgttgcttaggtctggcatgctaacagatatatgtaaaaagtctccattttgcaatatctgttggcattaggtacagctcctacccagccattttattagtcatgcaaatgaagataaaccttcatagccagcaaagtacaaaaggaactacctgggtttattgagattttaaaggaatgcctgttatagcgtacccattcatttttatgaagctcttgtttctaaaggattgctgtagtttctacaaaagggaagaggctcaaattcctttctaataccacagctccaggagtgtacctgcagcaggcagcagaaacccaaaacagtaagacagtgatattctaaaattgcattttggctctgtagattttgagagtagcttggttctgattttcttggaagtaatgtatagtgaaactcaagtgtaggtcttctctattttttaatctcagttgcttgagaaatgatgtgaatggaggaggagaaatagagtaagtaatgtggatgtgccatgggtatgtgcttggggatttaccttaagtatggaaaattagtacacacatttaatcttaacctatgttcaagttccccttcacacacacacacacacacacacacacacacacacacgggtgaacacttttgacaaacagtggagaactgtgctatattttcattttttctctgtttgtttaaggcaaggtttcactgtgtagccctggctgacctggaatttcctgagatcaggctggcctcgaactcacagagatcacctgcctttgtttcccaagtactaggattaaaggagtatgccaccacatctggctcaatatttttaatagagtctgtttagtagaactgttttataatttccctttttgtagcactattgcaaaagcaataaacttcgttcttttttaacagctcccattgtcatagtacgtgtataccccttaactcacttgtcatcgatagtcatgtaagtggtgtgttagtctttaataaatgacttattttagccaggagtagtggtgcatgcctttaatcccagcagtcggaaggcagaagcaagaagatctttgagtttaagtccagcctggtctatagagggagttccaggatagccagggctacacagagaaaaatatttttttgaacttataattacatcatttccctttttcttccttcaaatccttccatatacccttcctttcttgcttgctctctttcaaattaatggcctcttttgttgttgttgttgttgctgttgattgttggtgtatttatatatgtatatgtgtatatattcctaaatatataagtataacctgctcagtctatacattgttaattgtatggctgtttcagaatatcactggtacttgagaggaacaacgaaaaaggaggaattatttactctgactcacaatttgaggtttaattcacggtcatcaggcattagtgcatagaagcctatggtaaagcagagccatcgtggagaaaggtcatggtaaaagaaagctcttcatcttctgcatccaggaagcaaagaagaagaacgggaacaggccaaggacgttagacattctgttatacactcagcagcagcctacttcctccagctagagttcagcttctgcatccaccaacagatcatattattgattacatcagagttctcataactatctctggaaacacccttctagaaacacaaagaacaatcaagttgacaagattaactttaacaggtggttttaaattttctaccttttaggtaatattataccatcgtactaatttttttattaaaaagaaatattctgtataaatgtggtcagattctccactaaaaaaggagggacgttatataagaaaaaatgttttatagtcattatcttctctccattcatgtttatcatggtggtatatctccccctagactatatttttatgtgtcaatattctgctatggataccattttccacttgataatattagatcctttatatagtaaagatttcttataattattttttgtttgtttgtttagttggtttggtttggtttggtttggtttttggtttttggttttttcaggacaaggtttctctgtatagccctggctgtcctggaactcactctgtagaccaggctggcctcaaactcagaaattctcctgcctctgcctcctaagtgctgggattaaaggcgtgcgccaccactgcccagcattttattttattttattttatttttattttttttttaatttttgtttcaaatgttttctatagtttttctgggattttttagaaaacttttaatgaaaccatggatatggaaagtttgatgtaatcaaatatgtcagtacttttttttgagttaaaatgtatctgaagagaagctgtaacactagtaaatacatacttactagctaccatttcaagtggtgtgtgtgtgtgtctatgtgtttatatatagttactctttgattcttatgaagtgtgatatcctatctattttactaatgagggaattagggtatagggaatcatagtcttatagaagtagcataactgagattcaggcgaatgcaagagagagcaagagagagagtcagactcagacagcatggatatgagcatgcacatatgcctactaggtggcactgctgtatgctctgctggctcagagtcaatcctactctctctgatgaacactagagaaatgttcaccatctcttataagttaacagttttatgttttattgatgtgagtctggattttgccttgctctatgctgggaagtgggctcatatgtaattcagcatcccacatataatggtacctctttaggaacttggaaacaacttaccatcttcaaaacaagcataatcaatgccaccaattgtttcttcagttgtttatttcctcagagttcttggttcaatcttcttgcctactttggtctgcatgattttatagaatctcatgttattcttagttttaaaagttcataaactgtttcttcaagttaacacatgtttttatgcgtatatgtgtacacacgcgtgtgcacacacacacatgcacatgtgcatgaaatctattactcaggaggctactaggtcaggctatcttaggctatacaaagtatttccaggctagcttcagctacataattaggccctgtctaaagaataaaaagtaggtgttccatgaacctgaatgataaagtagacatatctccattttttaacaaacatcagctaaaattgaacatttcctttgcttaaaatacacaataaacataaaccacaataatattagcagaacctgaactttaaactacagattatttaatattatagataaataatagttctagtgcttacaaatcacatctgttaatattttatatgttttaaataatttggaaactatttctttgatactgatcccattatatccctatgtgctgtattctatgtactaagtcaaactggttcctctctcctttcccatcttcctcctgggccttccatcccctctgcattgcttttcacttaggattctctctgtttccctgtctctctctctcactccattcttcttttctttctcttcctcctttcacttaaaaacatcttttaaagagttccaccaattattttttaaaaacccttttctctttctggtttataaataggttagatagagtgaatcatagcaagaatttgaaagcatagtttggtaaagataagtgcaaaacaatcacctgtaggtaatttggaattgacccaaattttcttggtctggccccaagaaagcaatgggccttctttctggtcctctgatgtctgcttttgccccaagcctatccagtcacttttccaagtttttccctgataagacaatcattcgttccgattttcaaaatactcacgagggagtcctgtgcggagagaatgagacgcttagactatattgttgagatgtagtcacctctttgggattgtttcaaaacttcatatcttttatggacaaaagttatcatataattttctcacccaaagtggagcttttgatgcctgtaataagttggtgtttagttactcaggtgtttgcactgtggcctgccctgtctgctgcaacataatagtcactggccgcagatgccatttatgtaatctgggtggctatagaatctttctttctgaaagtaatttctacgtctgggataatgccatttttctacaccaaaaacattagctcgtcttacagttaatataagctgaacatgagaggtgcctggggggggggcaggggggagcgaggcccacagattgtttacatgagtgctatagtttcactttttatgcaccagtcaccttggaagaattaatgccctgtatgcgtgccaatcagattgcccccatcattgctaaacattccatttgctttattagaataataaatactgaacaaaaaaaaattcatctggatccaggctgtggtcagctaaagaaatgtatgctgcaccttacctctggctggatttaatggagaatggggatggagggagaacgggacaggtgggtacagatttcctgatgttgaatttgatgacagatctccagccctaagctttggaaattcttgtcagcagtgcagggccagtgctggtctccactttgttggctactcctgccgtgcccctctccatctggtgtttggaaaggggtagggtgcttttctttatcttgctacatggatgtatagtcaccgacgccaaaagaacttgctcagaatccatatggtgttctatctgatttcatggctatgattctgaacattcagaatcatttaaaaataatgtggtttttcaggtccttctaggacagatgtctcttcttggtttactgaaactcaagaccagtcatcgatagacttgattccctaactcacgcctgtaatcatcctttagaacctcattgcccattgtagatgatctatccttacttctcgggaagtcctgttccattgtgtatctttccctccatcccacatcagaaagtctcacagtcatacctcacgcctgatggtgcttgttacaccttctcccctcttatgtcatgatttaagtgtccttttcattgtcagctacattaattaagatcctcccaaactaatgattatacattcccagttcatctccttaaccaaaactacccaattgcccatgattatcaccaagacaggatatatatagagactctcaacgtctttttcttaaggaaaaactattaaacctaagaattctttgtctaattggtgtcttcactggagaaacaactttgatctaaatcttcccatcttacttgaatgccagtccttcttagggtccattccaatatttctctccaaagcaaatatcttttccttttaccaacatccaggactcctcttttactccttggtggccatttctctgatttctccgaggacttagaagtaattttcatattgttactaaggagcctttcaattccatgaatactcaggttcttccacatctcagctacttagacagtggttaccacctactttcactcccattctctccttactagttttcataaaacatgctggaataacttccattttcaaaatgagccctgtatcgcagatttcccctctagataacccaagctaactgcaaaacctgaccttctaactcatctcttccaagtctcctcactcaggcttttgtttccaaggtttcaccaaaaaggtttcttgctcatggctgttggccttgtccactgctttcatcttatatgccaggtcaggcacactcccacctcaaagactttgtcctgttgcttattctctctgttttatttctcaaatcacttgtgatctccctgacataagttcatgtgtctgctcaaatgttgtgtcacctcaaattctcttaactgctaagccatccctccaccccagttctactgcatcttaatcaggggagccattgtggtaaaataaaaagaagattgaatgcctagtctcaaaattcaggttctaagattgatgccctttttcaaatatgagatccagttttgtcttgtgcagaagcaagaataagaatggaattacattatttgcaagaattaaatatcatgtatagaagtaactagagtgacaaagataatgcctgatacattagaaagtattctagaagataatatttatccctctatcatagtttgttacaatcacgttactgttggatatcagaacctgttacttcaaagtacaccactttggcacactaagtattttgagctaatgaagattgaaaggtctcaaaggggtatactcctttaatatcagtagtcaagaggcagagacaagaggatctctgtgaattcgaggccaacctggtctacatagtgagtcaggtcctgccagggctgtgtagagagaccctgtgtcaaagaannnnnnnnnnnnnnnnnnnntaaaagcaaggtagggaggaaggaaggaaggaaggaaggaaggaaggaaggaaggaagagatcttaaaagtagtcaggcatctctctctaggctcctcctacccttctgtccccctttggacctttattatcagaagtccgcatgtcacataaaactttgtgtatatgggttgtgcatttctcctgttaagctctctattgttgcaggagactgttatgaccctcatgatgtctaaggaaagatatcacctcctattgcccctacaatgtaactgttgttgctagctatcaatgtctttcatagctcagtgtatagggaaacagaaacttgttatgatcggttcccatgactgtgtattatcttttgaatggattgttagtcatggtaataaatgaatcttgaagtcagtactctttgagcctcacctgccatttcctgtcagtcatgcttggctctctatttgcattaagcctccatcatttgggtgtcagtgtggagcccactggctctcatcctagtgtctcccacagctctgtgcagcatgtggtctgtgatgcatgcttaacaaagggcttttgaactgaatttcagcagcgtctaggggaggtaatggatatgttcttgcagggaattaggcatcaatctaatgatgaagctatggccatgcttgctgctgcttctggaaagccttgtggtcttggtgaagccaactaggccagataggcccaaggaccttaattgtaattaagggcatgggtcggggagaggggagggttgtttcttttggaggactcggggagaatatgctctgatattccagccaagttatggctcagcatctctaatcttttcacttttcagtaagaagaaaggagagatgatataaagaaaaacctcaaaggagccagtttcctgggggtacttggctctctgtaactttgtacattaggttgctagagctttgttttccctcatagccccattcttggagtagttaggcatggtgtcttagccagaatactgaagtccaagccagagggatatgtctaaatggttgtgtctataaacctgttttgtctcagagtcatttttttttttcctcatgagatatgtattggctgcagtctttgggctgcctatgccagacattgaagagaaagtagcaatcaaggcagaggtcctacctaggaagaacttgcgtttcaataccagggtcccggcgatgaccaaaacaaggtatttccaggtagtaagttagtggtgataggtaggtagaccgtttgctgcacagtagatggacaggggaagcctaaaaggacttgaactgtgactaacaattatgtgagagtcttcttgtcatggagagaactaaagaaactattcaaagaaagaaaagctggaaagaaaagacatttggctgtgctgtcctatgtatgtctgtaagtagacagggagagccagtgtaggagagaaaatcagtttgatttctttgcccattgcatggtttctggttaacaccccaaaactgaaggacagattgacagtttaaccaaagtcttaggtatcttagaatgaaggctcagccacaaggaaaactctacttttatggctagctttgatcaagtatgggcacttgtatagacttatgtttggataaaaagaggttatagccctctgggagtgactcgaggagaggagaccttagaaaggccgtttggtttattcagatgcttcctgccctgtttgcttatctttccttcctttcagggagagaggaagatgcctgccacatctgcatcttcaggagggaaggtcagggagtctttcttacttttccagtttactcaattttttttttcatttaaaacgctcaatatgccaaatgtgccataactttaatcagtatttattgcatcccatcattctataaggccacattctttcatttaatgttcaatggccagtgtaaacaattacctaatgcaatggtatgggacatacaggagaggaaaaggggggcagtttagagaggagagatgatgggagaggagaggagaggagaggagaggagaggagaggagaggagaggagaggagaggagaggagaggagaggagcgagggaagaggatgggacgggggaggagaggagagatgagataaggggaaagggccttgcctgcaggccaacttgttctcaaattcagatcctcctgcctctgcctgctcggtagtgtaactgcaggtgtgtgacttataccatatttaaagatgtccttatgtctattgattttagttttgttttgtcttttcctttccttcttccttcctttctttttcttttttcttttcttttctttctttttctttctttttttcttttttcttttttgatagactgtgaaaagaacatgaagttggttgggtagaaagcagggaaggtctggaaagaatataatcagacttcatgaaaataatttaaataaaacacttcaaaggatgtccttatgtaaattcttcgaaacaataagcacattcacaaaagccatttatcttccattaattgttaaagggccttatctaaccattgttttactccaggtcaactagaaggcttctttattttgagaaaacttcctgtccttcacagattttaggccaccctgtcatgaagactgcatctctgggctttgtgctgcgaatgtcacagtttaaggaagccttctaaaacttggcctgttccacagcctggtgcagaagttaactgcctgcagcttttactggctttctctttcagtttttttttttttttttttgttcctgccacaaggcaaaaacaggaaagagatgtgtgtgaaagaatgctctctcctttccttttgtggcgattgtgtatcttatgagaaggcctcaaaggttcccggagctgtctgccttttcatgtaaatggagcccttaagcctatttagaagtgtgtaaaaagcctgtgggagttgaggtgaaagatactgggttgtagcatcagcatctcatttattattttttttttcaagttcaactgggaaccctttctgctacataattaaagctacttcaggtctgtatgtgacacttgtccatagtaaaagtgctatgcatattaccgtatacacacattactgtgcagctctataactgcaaaaacaagtgtcttgtactgggaggcttaagggattccccagggtaattttgacagtgataattttgctaacttgagaatgcaactcccacgtaaaacgtgaccctctgcctccaatccctgcttattcactagtgtattaatcaacggatctggggttcatattcacacccaacacctaaaacagtagcaggtgtgaactggcaaaggacttaagagaaggggcaaggtggaaggatttctggtaaagacaaggatagagaccagagacctgagactcctgagtcaggctgccaagggaatctggccagtcatgggtgcacttttccctcctatgaaggaatggctcaaaacggcactaaccatgggcttgctattgtaagcctttctaggtggatattaagctccttccctcgagactgtcccaccttctaggaggacttcattgtgcatttgtcctatgaacgttactgtgtgtaggtacagcacctgagtttgcagtgctataggtagacacagagaagagcagggtcagagcagatgaccttctgcttctaccttctgcttttctgaggctgggatggggtgggaagaagccaggggttagggaagtgagggttgccgctgccagcccctgtcacaggttgttctggagaaaagttcccttaccctgtccccacctccccaccatccaaaggaagagggtttaatcagatgcagaaacactcagagactgggagaactgataaacagctcatatctccatttcagtgcaattgatccttgtatccatggacccttgctgtggggttttcacctgcctaccagtccccctcacaaatcctttagcaggctaatagaattctgagtcacttcccctgaagttggaatccttcccataactctcagtggtggtagggttaaagacatgctgctcaaaaaaataaaaaaattatatatatatatatatatatatatatatatatatatatatatatatatattattttttttttttttttttttttttaccctgatgtttgcagaaccctgcagaagtaaaaagatctccctcttcttttacccctttcctctgaagtagtcatcagacccagcctaggcagctgccttcagacccagaggaaaggaacatcttttattctgaagatcttcagacacagagaagaggccctgttaagccctccccaacctcgtgtacttctggtttcctttgttctgtcatagttctccaaatggcctctttgttaaacctaagcataaaaataagctaatttcctgaatcctcatttctgaaggctttcatgcacacagaacctatgctcaaggcgctgggccggtggttcagtagttaaaagcacttggtgctcttgcagagggtctgggttcagtccacagcaaccacatggcagctcccaactggcttatcagccacaaagcatgcacctagcctatacatatacatgcaggcaaaacacccctatacattttttaaaacccttataatcaataaatgtttatgttttcctcttgttaatttgttgccagagatacttagccattaatttacaatttaaattagttttaattaaaaataattgttttcccctccttcgtagcagctactagttttcaagcaagactctgtttccttatctgtagcacagagatggagcctccatccctgctctgtggggttgagagaaagaggaggcctgtaagtgctttcttggaatctatagattgctataaagaaactgctctggagagagttcagacacagatcatcctaatgcagcatgcatcctaatgcatcatttgaatcacagaaattcaaacctagctagtgcaatgggagccagggaagacctaaggaaggaaaaagcaaacaaagatccaagtcagcaagcagaagccacgtggcaagcaagcaaggacagccagccctggtgacaggaacttactactttcaacagtttcagtatgcttttttaaacttagatgttaatttaatgagaatgcaaattcttcatgaatatttattcctaaatttatgtgtttagatttataaagttatattagctaatcgtacagtaaagatgagcatatttcacggtgcctctctgcttcctgacaccaatccttgtttgaacacacagagttacactttactgtaagaaaaaaaaaaaaacaacaaaaaaccaagcatgtcagttttgtttttcagttcagaaacctgagtcaaatcagcagtctctaggaggagggacattgtaaggcctacgtgctttagtgatgggtctagccctccccaccccctacttatttgacattttcttgtggaaaacatctggtttaaataagcacccagtgtcagccttgatcatcagaaaccagaatgcaagagtcacaaacagtgtctatgctgtatgggttggggggtggcggggggggggggcagcaaagagcagcatgcagagaaagtcagcagtggagcgaatgaatctgcagataaatctcacctatcccatgcttacctttcaacggctcacagctctcttttactaacagctaaggacctcaaaacacaagtgtgtgatcatcctacccagtcagacccttgagatggctcagcaaataaacacacccttcatccctgggccctcacaaagactcagtgaaagcaatggatagagccctaagaattcttcatttgaaagaggctcccattcaggactatgtctcctaaatgagtagccagttttgactggctcccctctgatagtaatcaggggtagggggtgccatattgaccaacagtgtggctaattgggactacccaaaaagaagtttaaattgctaattcctagccgttcaaaggatcttgtgctggaatgactgatagacagggatagagttctattcctggcactctcagagactggcaggcttggtggcagtttagcacagtgggactgaagaggaagtttgctggataggtagtgtttggatgggcagggatttgtagctctcagtcaagctaggacaaaatactttggatgcccgaggctccattgatgtctgggaatgccagaggtgtaggaggcatcctagggtattcctatgtgctaaaggtgaagaaagtgtatacaagctaagcagcaggactttgagtctagagacattcatgaggttaaggatgttgaactagggattatttcagagatgttagaagaggtagaaggtaccaaatgatttgtcagaagtgttcaggatctacggaaagtcagtggaagcacaggagtaaatgagtgttactggtgtgtgcagtcaacctcctttgccatctctcatttgcctgcctggatataatattccaaagttaagggatgggtctggaggagaggagaatagaaaaacatggtctatcgacccagaaaaccttcagctgttgggattgtacctctaagtagcatatataactcatcataatgtttgatgtaaaataaaataataacttcaggcaagcaaattaggtatagtatgggcaagtgaccagacatcttggtatgcctaggataatcttggatttcagcttcctttcctgtgtccagtccacccaaccatgaagagttatggtcacagatgtctggagtaaatatgcgtgtatgaatctacgataactgttgtcagtggccaaaacagaattctcaagctgggtgctgaggtagggttacaaatggcagttattgtatgtttggggaagtgagtttaccactcatttacagataaatacatcacaggtaactacatcacaggtaccagagcgagtcctcgccatcattttcttgatgtcttgttccactgttctatgccaagggcaatgagtgacacatggttcctgttttaaaaatgctgccaggtcagcagagcagatgcatgtgaaaataactgtactgagtaagatagtaattgttattctgcttgtacaagccaagcagaggaagagaacaattgactccagaaaactagggaagaactcatacaggaggaagtacatggctcacatttagagaggtgaatatcaccatgctcagcaaaaaaaacggggagggggaagaaatgcagtagtgtaggaaacacatgactaggagctgaaggacacccagttggattaagtacatgtttatagatagacactcccatcacgtatttccctactcatgaggaagttcttagctggcaaagcaatccgtgtttgtactgttgctaatggggtttgggtcccttgttcagacatcagaaagcaacaaggagaaaagataagattcttcccttactggttacaaggttcatggctgacacccctgtcaaagaaggggatttacaagagaaaagcagaacaaatacatttatcagaaggcttttgtgacagggaagccttcagacacccatggaaactgctctggggacattaggcagaatctgatgagaagacagagggtggtactaactgggggtacctaccaaagctgatttggtctatttctgtttagcctccaagatatggacagaagttcactagaaaggaaaccttatgacctgcttcttgaagaggtgggtcagagaacttttaaaatagcttatgtcagaggagacaggcagaataaggccagaagtgttctttccgtttggggatgtatatgaatatatttatgagctgggcagtggtggcacacacctttattcccagcacttgggaggcagagccagggggatttctgagttcgaggccagcctggtcgacagagtgagttccaggacagccagggctacacagagaaaccctgtcttgaaaaacctaaataaataaataagaaggagaatacatttatgtgttagtttctagagcttgaaatactcacaatgacaaggtaccatgtttcagggactcatgttctcatattctgaaatccaacatttctttagcaaggagactgattttgggtctaagtgaaacaaatataagaatgtattataaatgaataaagggcagagtatatgacaaaatggattctcccacatgcgagctgaataacttctgaaaagttagatattctgttgacctgggatctctgtaccacagggttgatacaatatcatccccataatgttgttccttcagggcagaaataaatatgagaacatttcagaaagtgctttgaagagctgtaaaggttattttatcagaagggtcaggacatcattttttgtgtagtactgtgaattgtggaagtcactacagagacacagaaccccttctcagtgccttttatttaaatacaatgggtggaaatacatttcgaaggaggagaatattgtgctttcagaaaatatgttgcttttttggaggaaagttttactcttttttgtttgtttggttggtttggtttggtttttttgtttgtttgtttgttttggtttgtttttgtttttttgaggcagggtttctctgtgtagctctggctgtcctggaactcactctgtagaccaggctggcttcgaactcagaaatccacttgcctctgccccccaagtgctgggattaaaggcttatgccaccacgcccagctggttttactcttttgattgtgaattctaaggatgaacaatccagctgatttggttccccatagtccccctaacaagaggaacgccatggcaaccaaaaatattagagatatacctcaatttaggcaacttgaataagacaaaagcatttagtattgtatgaaaaaaaaatctatgcaagtctaggaatgtaatttaatgtggtcacatttaacacgaagggttatgacagagagagcatggtggccagtgggaaattcaaagaaagaatgggtctcctatgccaaggcagtagacacagagtgagatgagtgatttctcttatttatgaaaggaaaacttgaagatcagattaatgtcatttcctaaaattcaatttacatctaataaagtgcatagcttaatgaatttcggagaatatgtatacctaacagagatcctataacctagcacgtttccctgagcaactctgtagtcggtcgtccccctccttggccctgggcaaacatggatcaactgttttgctaaggtttcattttaatttatagtttggtcaacaagatcgaaataatgagagttgaacatcatcaaaatttgagattcagatcttacatctgctagaacaattccagaaacttctgagccttactgttttcatgcatctgtggagatgatatctatttttctatcttataaatccatcatgaaaaatccaaagaagtcatagaagagaaatagttatgtacagtccaagtaactatttagaaaatattggtttcacttagaagagtggtacttgcagactttagtcctgtagtgagatgctgccatcctctcatcgtgcccacacagatccttgaaggctggtcctcaaggatggagatgaagttatattttgaaatatttggcttaagggttcagaattcagtcttctgcctctagctgacaatatagatgaacaattcacttggctggtgtttctcagttaacacagatcacttactttactttggatataactataatgtaaaatgttctcaatggctctggctctgactctgtcatgctgtcatactcaaatgatttatgtcatgctcaagcacccactgaacttgtcagctttgtggtttccatttttctttggataaatctgaatttttcagttaagatgcttctctatagtatgtcagctgatgtgtaagtcactgctgtttgaacaattgacttacctatcatttttattggaatggagcagagggactaaccaagcttctgatagaattctatttgttttccttgggggaaaaagaaagaaagaaagaaagaaagaaagaaagaaagaaagaaagaaagaaagaaagaaagaaagaaaggaaggagagaagagaagagaagagaagagaagagaagagaagagaagagaagagaagagaagagaagagaagagaagagaaagaatttcctaatagctagagagaccaggtcacttatatcttccttgtctgtgaggtatttctgacattttataggcaaacctacaaaaaggttcagatctcacttttaaaaactgaggtaatagattgtgtatacacacacacactgttgctgccgtttgcctctgtgtacccatggatatcattgtgtggattgtgcattttcaaaaaagaactggccgtcagcacgacattctcacttcccctgtgtacattttgtagcttccccacagggaagcgaaactggtggtggttggaagagattgactctgttgaagtggattctgccaagtggctgtttatagataacctttgtcttagggtaataatagcaggatctacagaattccagcaggcatctgaaaaacagcccgtcactatcagaatcctaaagcactggctttggacatatattcacttaagatggtgatgagccaggaatcaggagagcctggttgggctgtgtgtgtgtgtgtgtgtgtgtgtgtgtgtgtgtgcatgcgcatgcacatgtgcagctttgtgtcactgttgatattttccttcttgtggtttatcttctgtgtagaactttcacatcaatcgtcaaaggcccattgcatctttaacttttgcaatattcacgtttccatccttgctctgtagagatgcgttaagtacttgctcgttaaaagagttaggccattacccggcctggaatgatctggattctatttgggcacttccagagagagggcagtattctgtctgtaccatcctcacgattaggatccatctggagcaggtgcagtcccatcagacctttgtgggccgttctctactatgctgctcggacttcagcgccgagctctctgtagttctctcaactcttaggagcctcttatttttctcaaactcagtattagacactcatgaatattttaagcaggttacacaggacacaaaagctgtacctttatgggcaggactttatatttcagaccaaacatattctaaaacataactcagatagtgccagtgttctcttcaaacccatccctggtttcttaccatcctaaaaccaaactctaagtcagtgtcatcggagccagggtgctgactctgccccacccgtttcattgaccctgatccttgatcactagcctgcagcaccgtggtctttgggtaccgagatgatcacaagcctgtttctcccaggatccttacgttcatcttcctggctgggattctaccatgaattccctggaaactcaggactgcccctcagaactcagcctaaatggcttctcttggtagcagccacccatcgttcttcatgttcagtgctttctttattcagaacccccaatctatctgaaactctcctgccctcctcctggtttccttattattgctagacgctgattgaggacccactcttcaagggcagaccattctttgtttgacctgttctctattgcagtctcctaacccagaagcttgtctaatccccaaccacatctggactcattgaggattagatctgaaggcatttaccttgccctccatccctattccttcccctcccctcctcatatgctgaaatgtgtggtctaggactgaagcacatgtcttggatcaaggttttcggttcacttgttcccttaatcggaagcgtctggtcctgcacagctgcagcccggaaacagcatcactcaccttttccccagggcttgacaggtaagccaaagtagacatgtattaaaagaccaagtaatactgtattatatccttgccaataaagtttcaccactgtacttcaatcaccaactagacgcttctgcttcttcaaggcccttactttgtggtgtgcccatctaagagaggctccacggatgtgtcgttggaccttaaatgcacttatgatccagaaggggaaaatggctaaacccagggccattggtaggggaagctaggcaacaaaactcagtgttgggtcctatttcttcctcattagaaagtctggaacagaaggttaagtgcttttcccgtgtggaggaaaagtttacctctgcagcctcccacagtccttccctgatgcccctcacagatcacccagctctagctgcaagatggtcagggctttgtgtacctatggtcacgtagtgtagtagtagtggaaagcttgtgccctgggctggatcccagtgtggctgtgtgtcttcagagaatgatttaacctttctgacattcacttctcttatctgtaaagtgaagatgtacggtggagatcaaaagcgatagaggcaatgtaactctggttaagaaagttgtcttcatgtttcataggtctggctggattcaggtactgagtccaagctccgactctcttgttgtcttatctttataaacttttaagctcacttttcctcacctgtcacacaggtgtgatagtatgggtacgatcaccgaaagtgatcaaacagggatctctacatcacttaataaggaaatgacagaggcaaactggccattgaaatggtgcttgaggtagtgtgctgaggaccctgacgtgagggaagtgccggagtaggagactgcctgttaggaagtctaacaaggctctacccttgatcaaactttgacagagcgcttcctcctcacttcatccaaatatgcacagtatttttaattgtagttttcatcaaagtaaaatatgtatgttgtttcacaagtttagtgagagtataattcttaacccaaagcaacagttcccttccctccccctccttcttgcttcttcctctctggaagttggcatagttgcctctctggaagctgcctcagttgagggctccactggcgagcttctcatgtccaacagacacgctggagctagcctttgttttcctgttttagatgttatctgaacagaagatggatactgggcttttacgcctttctctcttggtgacacttttaatataccctggttgttatctgttttaaaaattttaactattgatttatattgaattttatatgtgtgagtgccttgcctgcatgtatgtctgtctgtgtacaccatgcatgcatggtgcccagagaggccagaagagggggtcagataccctggaattgaagtgacagatggttgtgagccaccatgtgggtgctgagaattaaacccaagtcctcttgaagagcatccagtgctcttaactgctgagccattactccagccctattagtattgaattatttagcatgtgtagtatttatattgttattaagtattcacagtgagttataaaatatgtcataattatatctccctttcatttatttatttatttatttatttatatctccctttcttgatagtattttataatttctctctgcaatgcatgcacatcctagggctgaggacgtagcttgattagtagagggcttacctaacatgttgtgattcctgggtttatccccaggcgtagaaccgagtatggtagtccatacctgtaagcccagcagtcaagaagtaaaggcaggaggatcagaagttcagattcatcattggctacatagtgagctggaggccagtctgagctacaggagccctgtctcaaaatgaataggtggtggtggtggtggtgatggtggtggtggtggtggtggtggtggtggtggtggtggtggtggtgataaaccagaacaatattctctaccctcccaccatctttaaattgataaagggatttgaaactatagctgctatgcctccagcacacttaacattagcagcattgtgttaatactatctaatacccagcccatatacagatttctcagattgtctccaggatgttcctttacaactattagcttgaatagggccattgagcttttgcagaaattggatgtcatttgtcccacactggagatttggctgatggcttcctactgttccctttaactggtttggtgtctcttactagtgattgctgttagaggcttagattcagatttagggctttttcttttaagggtaaaagtattcaatacgtggtgctaaggacctattttatcatgctgcaagacaagaattatgcttgaactgacgttagtagtgcttggatcagttctcaggctcgggtggtagtagcttgtccttccctgatccagttctccaccagccactgctgaatgtttttggtatgtgctagtggtcatactgtgagtgattcactattttgtgacactcatattcagtacttgtgcctgaccccatcagtgtctacttattttactatttacaaatctgtattggaatcaaggggtttctgtgcgaccctccgtccaatatttatacacaactgtattcatgtaaaagtgaaacctttaccattgtgatgattacactttatagttgattctccagttgagttttgctctggcctcgactttataaacagaacatggaaggggttcttgcccttcgtgttgaggagtagctagctgagcaaggcagacttttaaactgccagcatagctaaagggctctgccatgtcatgcctccttgtacctggacaggcaactctgaagtgtgacagaatccctccatagtgagggaattggatgggaaccgccagggtgaactgcaatggcacacagtctttgaggatgttttggttgttgtttactttttagtgtcctaattttagcagaattcaacttctaaatacagcttgaaatgtggaaactcccttgcttacacacacaggggtggacactcttagctctgctcccctgagccccacccttttttcctttctggaagaacctgtcatctcaggccaaggagattatggggcctactcttcctggaaggttggggtaccagatacctagtggaggagaaagtctatcctggtgtctctcagctgaggtcttgttgccattcttctctgagagatctttttaaatacaataaattcctggtatacatgactaatctataactataggaagaaatgggatggccactttatcaatgatgtccagcacttcagtttaaaggatcacatctaaaatactctgtagatccaaattcttataacatgggttgttctgccactcagaattgccttccacataactaaatggtctcctgtcaggtcccggtctggtgacagtctccctgagtctccagtggggacccccttcttttccaatacactcacacatctctgtgcacctctctcactacaaggattatttgctccctttcattcactagaaatacctgtctgcttcattttaagtatatttagtatctagtaaatataagagttttcattttaataatgaaataaattttggttttatctgattcatttcctatcacaactgtgcttcaggcatgtttggagggtgtctgtcaccaaatgtagagccaaatattaaattttgcacaagggaaggaaagtacacacaggggagctgatatagatctgaagtcagaagcactggcttccagacactcgtccaccacttcataggcatggctgtagagcacttgcttatcagtagggcctcggtgacgctaagttctacagccagattcccctataaggatggagtttaccaaaagagggaaggactgcaggttctgggtaatggtggatggctcatggctgagagcatgggctctccaagcctgctttgcagggagaggggatctgcagaggtgcagagatgctctgggaaggatgggttattactcccatgggatgcttggggcagagacaacatggtgggcttagggggacttaaacacaaaccttactcttagcgtcctttcaagcttatcctgagtcttccttgtcacctcttgcttgtactggcctctcttgggaactctgtggctaagtcagtgccggagacagcttgtgataatttatgaccagcacgcctcttagaggcaatgggagaccacctcagctaagcctattctttgtttggtttggtttgatttgattttagttttggttttggtttttgatacagagttctctgtgtagccctagctgtcctcaaattcatagagaactgcctgcctctgcctctgcctcctgcctctgcctctgcctctgcctctgcctctgcctctgcctctgcctctgcctctgcctctgcctctgcctctgcctctgcctctgcctctgcctctgcctctgcctctgcctctgcccttgcctctgcctctgcctctgcctctctgcctgtgcctctgcctctctgcctctgcctctgcctgtgcctctgcctctgcctctgcctctgcctctgcctctgcctctgcctctctgcctgtgcctctgcctctctgcctctgcctctgcctctgcctctgcctctgcctctgcctctgcctctgcctctgcctctgcctctgcctctctgcctctgcctctgcctctgcctctctgcctctgcctctgcctctgcctctgcctctgcctctgcctctgcctctgcctctgcctctgcctctgcctctgcctcttgcctctgcctctgcctctgcctctacaatgctggaattaaagatatgagccatcactgcctagctttaaagctgttcataatgagtaaccattagagaaaataagtaagcaataacccattttccataggagaatacgggtcccaagcagcctgttctcacatcaaagacaatgagattccatccttgtggcagttttccctgtctctggaaggtgagctcccactgggatcaacgagtgtcaagaggaaggatatagagtcagttgggcctgggtttggttccatttaaatgtaaacattagacaggttattctttctgattgcagtatctactctattgctggccgtgaggttcagataagaatttatattcattcacacaaactagatatttaaagttattttaaaataacctacaaaattcttcaccatagttatgttatttacaaagctgcatctcacaggtaagaagtgagccatgttgtattttaaaggtctttctgcctaccagtgcaagctgctccctacgccccttagttccttgcctttctatcctctataatgggccttcttggaaaagaaactgatcaggaaaatgtcagcatggaaagtttatgctggtgagttaccagaatgccattcctatcactatctgcttttcattcctgccagtgggatgtaggatgcaacagtagatttcctgaatggtatctaaattataaaagattgtttttttttttttttaaagatttatttatttattatatgtaagtacattgtagctgtcttcagacactccagaagaggaagtcagatctcgttacggatggttgtgagccaccatgtggttgctgggatttgaactctggaccttcggaagagcagtcgggtgctcttacccactgagccatctcaccagccctaaaagattgttttatagtcacacaatgttgttgcttgctacaagctcagcaacttgctatgtgagtgtgtgtatatgtgtgtgtgtgtgtatacatacataggacagaggtcaatccaaacttgagtgtctttccttaggagatgcccatcttgtgttttgagacagagtctcttgctgggacctatggcttatcaattaggctaaattggctggccagcaaaccttaggggcctgtggatctctacttccccgggggctgggattacaagtgggcaccatcacatggggctttttatgtggatgtgaaggttgaattagatcttaatttactgattgagctatttcttcaacccagttgctcagtattttttttaatctataaaatagggagataatgtcatctacatcacagagctgtgatggctattatagaaagttatttatttattgcaatgtcatggtttacaccagggcctgtgtgtcccaggcatgcactttttctctgagctataccctgagtcccttaagagggttatttaaacaagacactgcgcatggtgattggcactctgtaaatattagttttcttctccagccttttcagggtttgtcctcatcaaatagtatttgctaggtattctaaaaaaggcatggcctcaaaaactttagctctgaattaagatgtgctggggggaaggtcagctttgagcagagcctgtagaaaccagtgattgttgtttgtttgtctgataataaacaataatggcttctctttcccttcccctggtcttgggtctgctgagtcactgtcccagccccttggcccatatctactatgcctgtggaatacagcaaaacacacacacacacacacaaatagctctaataaagggcagctcatttgagggattttgtttgcattcctgtgcttgctcccctggtgagataggaaaccttcaataagacttttcctaaataatgctgcatgtgcgcaggggaattttctctctgttctcctaagaaatgatcatttcataaggttccttttcatttttttttttcttcatctttcctgtttttagtgcattccacaaagagctcgttcctctgctggttactgattgatggttctgctctccatgtgccctttaattttgcaataagctaacaagaagttgagaccacagagttaaagagaattgactcactcactcacccggattcactagcccaacaggccgatttagtgatttcactgtggtcctgcctgccgcccgcccaccggagggcaggagtccacaggaaggggtgttggggagggagaaagaagcatgacatctcttctcagtgggaagcccttccaggaagtcaactgcagggcttgctccccacaccaggatttggaattccatgagacatcagctaagtggaaatggacagtcagtacttacaggttctctgggacttttctttaaaggagtggtggaatgccataaaagaaaacagctgtaacccaccactggcattttgatatgaatgaattaaaaaaccaaggacaaacctctgcctctgttgtccccacccagctgagttttccccataaggccaggtgcccaacaggaagcaaaggcactaatataatacttcttgatttccaaacatatcaagaatcaatcttttattattttgcattgctactgtatatatagtaagtggtctgaaaaatacaaataccacttaaagtaggaaaacaagaacaaattcaaatggctcagtagaccctgagtgagctactctctacaggtccaagtaaaactggaaagacaaatgtccacatggaattggcccctgtcatgaactcctattacagatcccaattctgtgtgtaattgcagcacacttaaccggctcgctgtctgtctgtctgtctgcgcttatgtagcagctttttcttcggaaactcttgtcatcacagtttagcagaagtgaaagcattagtagcgtggttagtggccaggacagaagaagaatccaagaatctgtgtcctttcccttgcccacacctaccagtgcatggttcctccccagcctgcaaactcaaccttttcagtctactgagtagcctactaactgttggctcattccttgccttcctattgaaagtttgttttattcttaaacatcttgttttagaatcatctcctctctaatgtgcgtggatattatatgattttgtggatatgtggaagccagaggttaatgcccagtgtcttcctctatcacttcccatgttgtctttaaaattataattaagatataattaactcatttctccccttccctttcctctctccaacccctcttctgttctcctccctccccattttaccccctctcaaactcatggcctccttttctttgattgtcattgtgtttatatttatatattgtattctatacacacacacatatatgtatatacgtatatatgtttaaattgctgtgtgtgttcagtgttgcttgtatgtgtattatttaaagtctgaccacttgctattacacaattaattagttcatccctggggaagactaattcttctctcagcagtcattagttgcctgtagttctttgtctaggagttggtgccccatgatatttcccttttctctgttactcttgccattgtttgggtcttgatcaggtatccgtgttacttcagtatcctggatatagcttccctgtcatttccaagagacatgatctccctgcagacttcctggtcctctggctcttacattctttctgccctctcttctgcaatgttccttaaccttatgtgaaagagctgtgttattgacatatccactggtgccaggcatcccatgatcagttattctctataatttgactggttgtgattttctgtgatggtctctgtctgcttcaaagagataggatttttttttttttgacaagaagtaagagattgacttatctgcatttaaagaatatatatttagaacacagtttgaaattatgctggtccagtaaatgggtaagggtgggttcccttctaagatctatgacctcactagtcctatgaagttaagtagatttcctgtgctagacatgatttccctcctgttgagcaggacttaagtccaattaggcatctgttggttgccactgttacacctttaggtatatcataccatgctgatcattgttgcagttcataggcatcactgcttccaccttattttgtgaacctggaactcattgattagcaagactggatggaaagcaacccctctgtgattctcctctctcagcctccataactggctttttgtagaagctgatggtctgaatttaggttgtcgggcttgtacagccagcactttacccactgagccatcttcccagatttctttatctgattttgcactgaacaacatggaacttgattactctgatattagcatgccttggtctgatgaactgaatcagtaaatcatgaggccatgcattttcatgcaaagaacttttccttggaagaaccagggagccatataggactgatttgagtctgactcacggtgctgtttaatctgagaaaagcaggataataatgttgacttgcctgggttgagaggatgaaataagttaaataaatgtcagacaggcactcagtatggagtctgtagataggaagaactgaatcaaagctgggttccattctccctttctgcatttggaataggaacccagaaggggacctagggacccagaatgacatcaaatcccttgaagtttacactgtaagcaaggatttacaaagattaaaaagacaaatctttatgatgagtaccatcataaatggcttggctcaactgacttcccctctttggactcctttgagaccaagaaatatttctgttaagtcttgttaaaagaaaaataacacatgtagagtaagtcttgcagtgagttccttaatactgatgctgaagtaggtatattaaaaactgagaaattagttgaagataaatatttgggaagttattcatgaaagagttgagagttcacctggatgctgaaatacaaaatcttaagaaagagtgaagggagggggatttcagactgggccatttgggatgggaagagtgagaaccagaggaagtgaaccatgagacataaacaggttctagaatggctgtcatagcaaaggtaatgttcattaaacacctatcaggtatcaggctttttaagagcatctcacatgctgtcctttgtcttcacaatagggataattgctaacccaattatgtagctcaggaaaataaggcatagagagagcaaatgatctacctaagtgtagacctggtgtttcactactgttaagagaagggagccagccgggcacttgggaagcagaggcaggcggatttctgagttcgaggccagcctggtctacaaagtgagttccaggacagcaagggctacacagagaaaccctgtctcgaaaaaccaaagaaagagggagagagagggagagagagagagagagagagagagagagagagagagagagaggccaggatgtttgagtctggagcctgcctacccctctaacccatgatggctagttgacttagttctcagtttccctcatacactaaggatcagttaagaccagtctgtgaatgaaagtataaaagtgccattactcatgttaatgatgtcagatgagtggtgccagaaagccaactgaaaacgagggagggaaagatgtaagatatcggcttcaatatgtagttctattggtaagatgagccggtggacgttgcacagacctagtcatcacctccagcaactctgaggcctgccagagcctcacatttcctctcagactctgctccagatggctgtttccaggtcaccagagtgaatggcagagagaagaaactggtttgtcatctggcattgggccttgttccttaggtgagatgggtccttgccagcctgtagcctctgactgggggtttgctcactagtggtcatgttggagagtgccataccaagggctactaggtaagtatttggccacttactatatttgttcttgacctattcttcttctgtctcttctttgttgactctgtctgattgtgtctaattttcactgtttgtgtctgtatcaatgtcttctaaatatggatgtagaagcatggaatcactctgcctcaaaaataaaattgtccatctttgaggacatgaaatcacttttgtacatgagtatctgataaagccgctgacttggggatttctaggtagaccagttaaccaacctttgaacaatggccgacagagtttcatgctacagattcactctggagatggagataattggacctgccccgtcagtgagcccatgctggttaggatgccacaccacttaattgggaacatagagataaggcagggatattagcactgctctgcgccccacaggacgtatctgaggttcctctgagcttagcccctgtctacaataagcatacattaggctggaggatcaaagttggtgttgatgaagttggactccccccaagagttatatcttcagtctctttggggagcaaatgactcaatagaacgatttttcttggccccaaatgagtgtaaggagggggagtgagtgagtagcagccgtctatgatggtacttatcacaaagccgtgtctttctaaccctccttgcaaaccgaagggaggggaatccccagcaccaaggcatacacgtgaatagaaagcaccacaagtaacaaaaacaccgaaaaaggtcatcagaaactcggggcgggagggggctggaaattcacctccctgcctgtctgaagagctcagtaggcagggatgaggaagtgggcaaagacagccgaacaaacttcatgcacagtgactgccacagaaaatgcacagaacagctggtaggaaagtttctttcacatccgtgtgaaccccagagccatctgaaaatgggccaccttcttttccatacctaggtagccagcctttcttggccccgtgctaactgcaaaatttgatatagttggtaaatagaccactggaagccacagtggttaccctgtcacaagtaaccaagagactgtgtcatttcctgcagtgggcccaacactgccaggttgggctagaggtgaaaactgcacactggcctgctaccacaactggtgccaccaccctcccaacccaccccagtctcagacccaacaggtcagtccactggggccaggcagggaacatgttaatatacagctagaactcaccatacctataagccacagccccacagttgctggccacagattttccctagagtatccattctacgggtaattaggccaaagagaaagcctcaccatcgtgcagggcagttaccccatacctggtgtgaacaaatggcagacactgtccttcctcctccatctcccggaactcggtggtggaggtgatggtagtagaacgcttaggggtgccctcagtgactgaagaggtgagcatggcaagctgaggagatttaccatccttccatatgtgctgtccctcacacagagcctgtctttcctccagggactcttgatcagcaacactcttttctccagctcggctgtggattgctttggtctgcttctcccagggtgtacactccaggggaaaccctgcagccagcaactggggtgctgtggccacaggcatggcgagttctagttgagtatcggtttgttgctccttggtcttaatgaccttagcacctgttaattctgggacatagggaagggcaacgattgaggaagacagtccactagagagatctgtattcgcagatcactgtgcagtgtgaactgaagtcttcacacaatgagttcaaatatgcccaagccatctccctcactgtgtttccctctccttttcctcagccgctctccggcatctctgggcagagcagcttccttaaggttgaggctaatgaaagtcaatgacagtcctggagttttgtgtacaacagcagaactaaggcaaactgagacatgttaacatttttccttcatagccccttctactaatagccatcagaatatattaattctcgccatagcttttgtggactcaacactctaaagaacagaggggttaggcacacttcccagaattgctcagcagattcgtgccagagccaaaacgaaatataggcaggctgctggaatcccacaggcgtgttttcttctggtcaaattggagcttggtgttttatgacaaatatttaaaaaaaagaaaagccttgacaacgttcacattttcccagatagccattgtcctacattcagtccctcacaatggaaatagcagactggcatcccaaagccttatcggttctttattgtagagctgatagttgatattctctgagctgaagagggacatgatctctctctatttctctctctctctctctctctctctctcttttcatcatggaatgatttataattttccagagcttggcaaaactaaaccagtgaatagtaaaaccagatttgttttcgtgatactcaaattccagaatatttagtctgactttccctcacaacaaatgctggatatctctttccaaagatggaagcgggtaggaagacagtgggaggaatgggggcccatgcctgggagcacagccctttggacctgatggtgagcctaccctgtttttaatccatttctctacacacacacacacacacacacacacacacacacacacacggggtggggggagggagggagggagagagagagagagagagagagagagagagagagagagagagagagaactctttcctttgcttgctctcttttttctgtttgcctcgcccaggggctctctgggagcaggagggttggccagacactgtcatggtcgggaagcaagagtagagcatgctgaaaaatcactccaggacatttctcaagccttggcgatgaaagggctcaatgaacctgaacaatttctcacaggaaagttccggcctctgtctccttaagagcaaggcattctacaagctttaacagatctgggatcaaaattcagactgtctgactcacccaaggctttgtttggataaaaagaccaagtcactgtcatctctgcaattaggatgctttaaggtacaaaaagtaatattttaaaaaatgttcctggagcagatagactattctcagtacaaaaagaatgattatgcctttggagcccaggaaaggcagtgactcatcactgtgcttatacctggctggcagtgagtagagttgatactggaattctggtcaagctgtctctcccactggccctgttcttcagtgggctgcctatttacaatcacagcgcctagccctcctggctagttaaggcgattttgaaacttcactgattctgtggagcaggctatgctcattttctgccagagggtgggcacaggagacagtggtgttctgggcaaagaactccttgagatgcctgacgtcatgtgatggtttctctttcctgtctaccctttgaactctgttgcaaatagttccatgaagagtttagtttcagaaatgaccagtccaatgtatcagaaaacttgacacaatttatgtagactctttttcatgcttgtctttccagaaactgtagctgtttgcccatgtagctcagagttatttattagtatgactggtggcttgttatccagtgacttgggacagttttatagtacatgtctggacatgagatcccatagttcatgactaatagattgaattctctaagccagcacttcaaggcataaagaagtcacctgctaaatagacctgggctcagagaccctctctcctcttcctactgttactttaggaaggaagagaatcaagaaaacctgcatgctcctcctgttatctgggctattgaactcaagcaggtgactgcttcactcagtggaaaatagatgataaaatctgtctctaacatgcccacacacagaatgaatgatagcatttctcatattcatgatgtctttttttttttagtctaacttgtttgaacacaccatgtggaaacctactattttataagctttgtgttggggggggagagagagagagagagacagagagagagagagagagagagagagagagagagagagagagagagagagagagattgaagttcatgttacagaggattatgctcatcccagaagacaaacaaaaatcccagtgcaagatatgggattccctcacctcaagttgttgatcagaggtatcctagagactccaaacaacacaagttattgtcattgttcctagttgcctactagaacttgatggtaagaccctgttggttaaggcattgttcataagatgtggaaaaatcaagttagtactgaccaggaagcttactttgctgggtagctttcatagtactgtaaggggctatgcaggccactgaggtaaaaaaaagtcatcaaccgagttacctagatatgaccctgggaatcctgggaactgcaaacagtcaccctcatggtcagatatgcccatgattgcgggatgaatgttataggatgacccaaatttctgattggatttaaagcccggtccacagaaggaaacacataccaggtaaatttggctaagaacccatgatggggtgctcacaggccccatggttgagcttactcctattcattcactaaatggacactaactgcactctaaactcacatctccctccctgtaggttagtgccaccctgagactccttagaaaaagtttccctaaacactggatggtggtggttaatacagaaactcacagctggtcaaagtgtggagagtaagtgtcaggggtgctcacccacaaatgaggtgtctgtctatatcacactccctcctcagggtttacagatcactgaaggaggggacacagaaggtttgtaagaatcagaggtcagggaagacgaaaatgaagtagtgtcttctgaacattcaaggatggctgtgcttacaagctctcagcagctgtagttgcctgtgcaagatttataagtgtcatgccagtcagcactgtagcacagagagagggggattcacaagcccctacccctacccgagcgctatggacaactgatatggaagaaagagagtcattttttctttaagagggttgtcactagatgtccccttgctccagtggatggccccatacccaggcatatacagccagcacaaattggagtcagttatttttttaaaaaaacgttaaaaagaggacacaaacttggaggggttgagaagtgggggtgggtcagggagggggtgtgtttagaatcatataaaaatcttaaagaattaagaaatatttaattgacttaagttactagtttgctgaccattaagatttcttctgctgctaaacaagaccagatattacattctacctattctacccctgctgactaaaaactttgtcttttttgttatcttctaagagttgagaaaggtacttcttatatcaaagaaggcagtcttccattctgttctctccaatgttgatactcatggtgggctatggtatacttgacagttgatgttgatactcatggtgggctatggtatacttgacagttgatgttgatactcttagtaagctatggtatacttgacagttgatgttgatactcttggtaagctatggtatacttgacagttgatgttgatactcttggtaagctatggtatacttgacagttgatgttgatactcttggtaagctatggtatacttgacagttgatgttgatactcttggtaagctatggtatacttgacagttgatgttgatactcttggtaagctatggtatacttgatggctactcttggaagccccaacactgatacttctaatccttcaatgtggagcagatcaaactacacacttaagaggccccaaaaatcagaattattctggagcaggattaataatctagaggatggtgtgagtatagccttgtatcatagcatagctaaagacagttcaactgaaggcaggtagtctgcactggctcatacactagaggagagttgggcttagatgctcaagtcccctgcttgacctttaggccttgatgacaagcttattctgctcccaccctctgatgataaagcatttgacagtcgacttaatacttactggaagcgagtcatatattttgtctgtgtattatggttttctgaatgaccagaacactctgtcttctgactgaaactacatcgatttcccaacctaattcccatctctttcctctaatgtccaagtctctgtgttgtttatgagtctgcaccttgaatttacttctttctagggaagatcattatttccttaaaccgttcacacagaggcattgtgccctggtgcacagaaagatggacatggtgtatttatagaagacagtgtgggaggaaacttgagatgagccatgtagggaacagaagaaactatgtacagaacagaggaatccctgagtgagagaagccttgaatgtatgctgttgacaggagcacagccatgtcagggaccccatagcctcaggttcaaagggacagcagagcctttctcaggaaaccaaatgcaatgttggtgatgtctgctgaaactatcgaccatagtttctctctgtagatatttagtccccttgctccagctgtattccattaactctgcctccttgtttatctgtatgtaataaccccacatctttgttcatctgtattcaataaccccaccactctgctcagctctacataataaacacaatgagattctggggtcctgggattctccaggtgagagcccagacactgtatcccaggtttttgtccacatgtccatctgtctgtcttttattcattttcttaccactctactcaggttcatccttggagtcatggtgcacatggcatggagacttgtcttggaaggaaggaatgaccccctccttctgttgggagggagtattagcaatgggactcatagtctatgctccattatatgagggtgcattttgtatacagatgtaattcttgtgtatcctatagtcaaggcagtgctagaagataagtcagtgatctctccatgaaaaaaaaaaattgagtcaagacagtagttgctgtataacttgcaaggtttcatgtgtcccccccccccaacagtagggggatggttttctccttactaaacattgagccagattcagtttcttcctgatttcagatgaaactatgatcattaaatctcttatcttcccttttgtccaagagtcccccctcgggctttgtagttatagcccatggtggtatgaatgtgtcatgttttcaattagccacgcttttaaggaaatgggggaaataacagatgcacttccaattcaagttttattgcctttaaagatataaatagcaaatgtatgttctttgtcaacagtgaatgatatggtctacaaagaggatatagacttttatttgtgttttttttttaaagatgagaaactattaaaaaatttcttaacagatacaaaaaaaatacacattatacatactaacaggccactatgttaagttgggcatgagtcttctaaacaagcaaagcagagttgggacagtgatggggatatcatttgccctaggttgagtgctgtgttaaagactttaagtaaatggtctagtctaatccttaagttcctaggagtaaagtttatcacatgaagaaaatttatgatactgaccagtgttacataggtcagaaacaatagagccaacatccgaacttcagtctgtctaattccgaagccactgtcttaaagctctgtgcagtctgctctcacacaaatttatgtccaatctcagaagccccagttgctccagtggaacggagtttatgaaaagcccttggaagtgtcagtcagaactcatttcagaaaccagacagtgttaagactctgtttataactccgcagtagtattttataagttattttaagagcatagttttcacatctccaaatcgcctcggtgaaaaacacatctgtaggcttctgtccaagttgtgactatttgtaattgatgctttcggatgtgtttctgttctgtcattttgctaaacacagatttagaaaaccacacaattctatcagatgatatgattaccaagcccttgagtttccaggcagtgggagcctttggtgacttggctttaagactcgtgataatgagggggagatcatccggagagccacttaggagagagaaaaagcttcgtcttcatctactatctctgtggaaatggatactttcctttctccccttccccactccttgtttcccctcccaattctgtcattcatatgttggggatcaaccatgatcctctcacctaggaggcaagtgctctgctgctgggcgtgcgccaccactcctagctacctgatgccttcttgttcctgcatacatttctggagaagccatgcagctccctctcctcttagtgcccccaatatatatgtcgacaggcgttgctttacatggaaggtactatagtcagtgaagtcatagatataaacatgtgtatatatatgtgtgcgtgtgtgcatatgtggtgtgtgtgtttgtgagtgtgtgtattctgttgccacattgcttgagttctagtcactctcaccaagccatcatctggaagaatcccacaaaaatgaaagctcactttttattatcatgttcctaaccaactaaaagtaacgtttacatagttctgaggaaacaatcttcatgtccacacataactgaaccaataagtgtaacagaaggctgctgagtgtagtcactgatatacttgaatgaaaggaccatttttgggtggggcataatgtcatgcattttaattctagctctcaagggggctagcctgatcttcataatgaattccaggacaacttggactgtgatactctctctcaaaagaaataaatttcagaaaagaaaatatcattattaaactcatcactttgtacaaataatgtatgctaataaaaaactttaataaaaaaatcaaggctatatatctagacttctcagaagtcacaacttaaaacaaaaacaaaaaaactagaacatacattattttgttcctaggtagataaggtgcatataactatcagagcatgtcggtgtctgattggctttgtcccaactaattatctttcctactgtagtagtttcacatatgttttttaaatattcaatttattattttatgtggatgagtgttttgcctgcatgcattgtatgaatacagttcctgctacagccaaaagagggtgacagatctcctgaactggaattgctggtggttgagcgcaagcatgtggacactaggcactgaacatgggttctctgttagtgcgtttacccgtggagccatttctgctgaactttttttttttaattttttttattagatattttcttcatttacatttcaaacgctatcccaaaagtcccctataccctccccccaccctactcccctacccactcactcccacttcttggccctggtgttcccctgtactggggcatataaagtttgctagaccaaggggcctttcttcccaatgatggccgactgctacatatgcagttagagacacgagctctgggggtactgttcatattgttgttccacctatagggttgcagaccccttcggcttcttgggtactttctctagctcctccattgggagccctgtgttccatcctatagatgactgttagcatccacttctgtattttccaggcactggcatagcctcacaggagacagctatatcagggtcctgtcagcaaaatcttgctggcatagggcaatagtgtctgtgtttggtggctgattatgggatggacccccggtggggcagtctctggatggtccatcctttcgtcttagctccatactttgtctctgcaactccttccatgggtattttattccctattctagggaggaattctgctgaacttttataacaaacatttgtggttaactctataaaaaagaaaagagactaagtttgatgggcatgacgtgccaaaaacctaatttctgatatgatttattattcagttattagaaccaatgtctgaagcacaatatgtcattaactcacacattgtccttctagaacgattgtcatgacttctgcacatttattgaatatttacttactaccaggcattccgctaagtactttatactgattgtctcggttcacgtaaaaattctgtaagacagatattattttgtatgtcgaacatggggctcaacagtttagtgacttttccaaggtccagaatgtcagagtcacaatttgaatccagccatattaaacagctatattatgccatatattatgaagagagagatgaacatactttgttattaatactctttcacataaatagttgttatttggggggcgtgtttactgacgtcagctcgtgtgggtcttaccagtctggataagaagtagcaaactgaaagactgagctatgagaagggtgaatactgtgtggactcccggagcctgctcagcactccgagacggtgtgcagacagctggagacacgagtctccccaacactgacgaccctaagagcttgtctctgctaatagagcccctcagctcttcccctgaccttgtcatcctcctcctcccccacccctcaattaagccacatggttctcattggttcaggacttatatgtggcgatgatccatggtgagagatgtggagtagaaaagccaggtgatgtggacatcttacagtgtagctagagatagagcacttggctcgcattcacaaagccctgggttcaatccccaatagcacaagatgttttttaaacggacattattctgtatgttcaagatgacaaacccacaagctatccctgacaacagaccagggcggttctattagatacacgtgccaagcaccaaatcgtgtacacgggactgtttccttcaggtagctaacaagtttctttcaagtgtccagtgcttctttcttatgatgggagcctcatgcagaacttttgaaaatgattgtgttctcagaattttccaatagagaatcttccttttattctctctttacagtcggtaaacaatagaatagattttattggtggaaatttttaaggaaaagagtttttgacttaccaaatataagagcattgtatagtattgggtgatgtgagctacgtagtttagagtcttttccaggaattttaagagctccaaactttagtttttaataatatcgtgttaacatatgtcttaaatatatagcaaaactgtcattgggggtgacagggagaagccgctgatctccgaactctagatgatgactttaaaatcagtaccagcaatattcttagacttggaaatcggttttcaaaattgataaactttataaaatgtgcacgggtacttcttgattctgattcgctctctgtgtttagctaatattgtaacacttctcagcttgcttagcatctcagatgaatccgtcagccatttaagctctgaggaaagcctgcctgcttctgctctctgggtcttgaataatgataggcccctcctgaagataagctggtgatagttcaagcaggggttttcctacctggcttatcactcttctcctaaaccacagcctgccttttgatagctctaataattaatttggtcttctctctttcttctccccccccctgctctgttctcccttgtctgttcgcaggttatcttgacgaatcaaattacgacccatctgagtggagccctcccttctcaagcagacctggtgtctccagctgatgatttgtccctgtctgaaggtaaaggatctgtcctggggagactgaaacttgacactgacttacagcctcctgcctcctgttgagagccgggagacatggctactgaactctggtcagttctgctggctggagcctggtgatttagacttgggcatcttgagggacagtgatctattcttgtcttttgctggctctgagtgagttccctttgaggcatcgtcatactcatccatcattgccccatggatggagtcttgttacccctctgcggtgcccccctaaccagttgctgactatttctgagactgatactccagcattgcctttattggtggtcccctgtggtgatctcaccttttctttgaaccaaacacctctagactgtctgaaagtgtgcagtggttccatgtgcaggtgatgtgacattcctgatcagctgtacagaaggaacatgacaaggtcttcacaggggcaaagctgcccattttctatgccacctcctacttgcaaaggtcagacaggcttgaattttgaaggcagcgagccttgagtagttgggggaactacatcagcagccagaaggtggtttctgatgttgttgacagtccttccttgacatttctaggctcttctagttgcagttgaatttggggcacggcgctatgggaagcacacagtccttctagcacatcttccctttctactttctaaaaattggtcatgatggaagacaggggactttcaggcctggcaaggctcctgactgcctggccaggtaggcttcctggaccactttagtctcagcctggaagccccacatgtctgcttcttggtgttgtctttggagtgaaagctaatgatgtatttgtgaacgctgtgaagggctgtgtcccttcctccctcactcagtgctctgtcaccctcctgccacctgagctgagacttgaacaagctgaaattcacctctccttcaacttctctcatcaaatcagtttcagctttctttccaaatatattcttcacaagtctcttcattttctttgtgatttgtgttgtgatcaagtgatttattaaaactcataattggctcattttaataaaccctgtaggaccttctgtttccattctactctttggcttccttccagggtgtttccctcctactcagctcgctgagggttgtctttctgaggatgtgctaaaagaagtgtgccgatttgaaaatattcagggattttgggtttattgtaacaaccatgctatacaacatggggttcagcaaatgcaaagacacccgtatctttcttctgagtggaccagttcctagaaccccactaaacaaggctaatctttcttaaccattccgggtcagctctctccttgctagtcaacctactaagtccttgaatgaagcatccgtgtcaagtatgcaatcttctcatgcccttccctcactctagagcagcgtttctctttgtccccttcccctcttcccaaggacttcaggctcaatgactgcctcttgcatagagagagtctcctgacccatactcctggtcctgctctcttctccctctatgccttctctaccttctcagatatgtaaagaaatggtggcgcacgcctttaatcccagcactcgggaggcagaggcaggcggatttctgtgttcgaggccagcctggtctacagagtgagttccaggacagacagagaaaccctgtctcgaaaaacaaaaaacaaacaaacaaacaaaaaaatgctctaagaagattaacttggtagatatttctttctgctgctagagattaaatttaggactacatgcatgttataatggcaaggcctttaccactgaaatatataacaagctttaaactcccggattctcagagacacacactatgctgtattctttttgtgttcatgctttatgtcagtgaccaacaaaggttataggcatactgtgagcagtaagtagatattaagtgaataccacagaagatagtgaccagtactctgcctatgtatgtcattaaaaatcattatgactacatatacacacacataccatatgcaccatatatacaatatacacaaacacattcaaatactatacatgcacacatcacgcaaacaatatatgcactacatacaaacacactcaacaaaccatacatgcacacatcacacacactcaaaacatatatatcatatacacactatatacaaacacactcacaaacaatacatgcacatattacacacacacatacataccccatatacatatactatatacacactacacacaaacacattcaggaacaatacatgcacacatgacacacagatacataccttatacatataccatatacacacaatacacaaacacactcataaaccatacctgcacacatcatacccacacacaaaatatacatataccatatatacactacacacaagcacactcacataccatacatgcacacacacacttgttcagctctgaggaaattggaagattatctttcttctttatttggaaacaagttcccagaatcctgctttatattaagcaaagtggaatgaaatggcaggggaagaaatggctttggactctagtgtaatggcaacaggaaaatgatagcagcaaaggaagttcctagctcatccttaggtaactagctgttcctgactatgaagccctaatggcgattgaagcagttggggttttgtttgtttgtttgtttgttttgttttttaaggtattttgcttgtatagctaaataggtaaagaggatgtgggagtgttttaaccaaagtctaaaatggggtcatttaccagtaagttaaaatgaacagattttggctggggaaaacacttgcctaatactcttgaaacaacaacattccgtcccgagaacttcagacaaagaggtgggggtcatttcttagaacattcattcctgatcaaatatattgcaatggtccctaagttcctatgagagagagagaggagaaatacatggcacaaaatgcttgtggtttcagtcctttatttggtcacctttgcctatgcgctaactaatgacgatgggcaagtcttttcatcactttggacctcagtttcttcttctgcctgatgttagtttgaagaagtgagcgattgcttgagtctttttcagtcctgacagggtgaggtgggtctgcagatgggcagcacccagccacgggtggctcttctgtttcacagagtaaacctgtaatggatttcagctgcagaacagaggcccttgcttaaacagtgttcacttgaaaacagttgtggggtgagagcatgcagccaagagcagccagcaataaaatgatctgggttgacctgagagaagcacccagcaggggttgatccgggaaatgaagtcccttctgctctgctgcagagaagggaatacaagtgacctggtccaactgagccatctcttctgcccaagctgatcctgtgctattaatatctgccagctgcaagcccagagcatcccctgctgagatcaaaggagcccctatcttagctggaacaaggtcatctgcacagggctataaaagtaagtcctggctggctacaaggatggctatgggggaggagaagtcaggagatgggaggcactctgtgctcctttaatctcagctgaccagctgttgccctcccagtgtttgtagagttgagagttctttgttttggcattgctgcctctgccttattcaatttgtgcctgggttgttgtctggattaagcacacctagtgttcacagtttgggtccccaatatgagtccctgcattgcagtttcattccagtgttgacttaacagctctgaggtgggatggccaaagaaggaaggagtggactccataggccgacgcctttcccaaccgattcctgccctacacagcttgtgtcttaggaaggaataagaggacacattcagttacttggcgtttttgcagcctgcctttcatgaactaccctcattgattcaagaaaatagaacattcagggtccatgcaaagtcatcccagcccagggtgtttctcactctctctgggttgcatacacttctgattggctatatgttcatatggaagagacacaaagagaataagggacagacagccccagaaatgaatacggaataagaaagaagcaatatagaaagaggggtgtgtgtcaagcctgccaaagtgtctttgctaactagagcagcctcaacaatgaggtcatttgcctgactctgtacagtagagttaaaatcccaccagttggttgctctttagaccccctactgtcttacaataatatcagggctggaaaagacttcatggttgttctatttgtccagcccatcatttcacaaatgagaccaagtttaaaaaaaataacaatatttattgttttatgttttccataattctagacctgagtaggtagtgtcattcaaagcaacttttccagataattgttttaatggtgaaaatcctgatatacatactatcagaaatcattcaacagttattgcaactcttctgattcttagctcttgtagttcttccttgcggcaactcagaagagaccctgggttgctgggcctcagtcacagggactctctttcctcgtattggtcattagggaaggggtctaatgacctagctgcccataaatgcctatcctattctgacctaggatttgagcagaactgacccaagtccccatacactggggcatggttggtaggtgacattgttgtgtagtagcaagattggagctctgctcaactcgcacctttaacttgctctcttctgatggtttgggagggtagcagttaattttcaatatggtgacatgtcaggcccacttgaggagtcccaagtcgtttcatgggatggaagacattaccgggctgccacccagtgttccgacatctggtgcgttggtatcttcttatctctgttagtagtctttggttgactacagcacatggaaagtaaaacttgaaagtgcatggaagggtcaaagatagaacaaaagaagaagtaaaatgtgctccttaccagaaccaggagtggattttagttttagtgctggaagcctttctattcctgtggcagtcaagggaattgatggctgatttcatttgcaagagaaagtattttgggattcaaattccctaacaagccacccttgcaaaaagctggagtccatttgaaagattatatgcaagtgtgtgtggcttgtgtgtcttttaaaataaatttagcaagcaaaagcagctccgaatggttggggcgaatcggggactcgtggttgtgaaagaagcagacttcaaagcgtggtatgaattctctcgttttatttccactcttgctttccagctggctctgctctgaatttactgcaggatgtttgaaaatgcggctccctgctaatctcagacagttgctgtgatcaatgctctctttcatttccgataaaaaacactggtgtttctgcttaaattgtgtgtactttcagctttattattttagttgtgatttattgttctgcattacccaaatttgtaatccattaaccacaaacttttgggtgggttggtcaagttagccaactctctccacatgttagctccaagcccttcagagttcaagctcacactggagttcataggtttgtgtagatcaagtagacgttggaatgtgggtggagcaggttcacacccactactcggaggtatggtgcatggctataattggtgctttgaaagcatcaggtgtccctgtgtgattttgaggttaatattaacagctgttgtcaacagcatttaattagcatttccatagtactataaattgtcttaaaatgataaatgtcttagtccacctcaagcaactggagcatgaagaagagaaggagactgctcaaaggccacaccgtgagtgaagggtggtgccagggacaggagtcaccgtgtttcccatgaaaccttagatttggacatcacggcttcttcagagtgagttttggataaagatatttaaaggacccagtgatctttcagtttttattccaaagccacagacatatgtcaacacacagggcgttcatgtgtttctcttcccaagggcacacatatttgcccatgccacacattccctgcagtctagaatctacagtgcttgcctgtgcctatattacttccagcaactgtttagatgccatggaaattctaatttatagggaaaaaaagaagattaaaagcacacaaaaaatgtgtggtgtttggctacagaaagtctaaatattgtgtaaggcaggggaaactggagttgagaggaggctggcacagcctgcaaatgtcagaaaagccataaatctccagagggagaggaaccgagtgagggttctcagtcaggaggccaagggggcaatataaccatgactgaaggatcaaaggagaggggagcattaaagccaagcactgggaagtccgcttagccatgagctcggtgctctggtgaaggaagacacagttgaagcacaggtgtatggtagccactctgggtgacagtcagagagaacagtctttgacagttttataagatctggatatgtggggctttggttttgttttgtcctgtttaaatttttaaaattatatttctttatgtttgtctgcatgcatgtgtatatgtgtggcacaatgcggtacccacacgtgggcaggccagagaagaacttgtgggagttggttcttttcttctatcatgtgagttcccagggtaaaatttatcatcgggcttggtgagcctcttttacccactaagacaaagtatagactttattttgttttgagatagggttttactacctagtccaggttggccttaaatttgtgatcctcctgcctctgcccgccaggtgctctaggataggtgttgtgaaagtacttccccttattttcagagccttttaccatctaaaatttactctctggtttcccaggtctgcacatgtttttgttaagggctcagggactgaggggattcagtcatcagaaccaagctttgtcagttgcctccatgcagaggtaacaaggccaaagagaatggtatgatcctggaggctttccagttggaagggatttctgagaagatatccttattggccatcaacatagagagctctataccaagggtgggacaccagtaagtcagactgatggcagaaggggaaagtagctgatttgtttagtgttgtgttgtaatgtgacatgaagtgctttcaaacatgcgtttatagaattgactggtggagtgtcacaatgtcctgtgaagtagtatatcctaagaacagcccagacaaactctgacaaaggttcttgtgtctgttccttccacagccatgtgctctggaagatggagaacacccctaattagatctgctcttcagtaaaaaaatatggaggacttgcatttctcctgtagaacctttcttctgttgtttgtgaactttatctagagggtttattaacatacacgttcctgagcttctactcctagacttccagttgatctgggtaaaaaacaaagaatttataggtcaaccaaattctgagccttcgagaataggatagtgttggtccagaggtcacaatttaaggaccattgcttgttcagtaagtctctatgggaaacatccccgggatcaagacagatgtgttttcatctgaattctcaccaatgatgcttcctgtaggctgggatagaggatacagagacagtcttggaactcttgaaagtaagagcagaagaaagtccatgaatatgtgctactagtattgatggactatgtatgtgcctgactttgttccaccattgttatatagaatccttacagcaactctacaaaaagacagcattcattatcccatcttacaggcaaagggcctgggacttatatggcaaagttagttagttgtggaggcagactccagcccattgaagctagttccaaagtttacattttaatctaccaagttcgtctgtgaagatttaattaagagtttcttaatctatatgcaattgggaaccaaaatgtagtcaaatcgtatggagaatcagacatccagagacttcaatcattctatttatttccccatatctctctgtaccatggctttgcatcgtccttagccttgatcttatgaacgggttggccccgctgacctgctatgtctgtacatcagttatccttttgcccaagagttggaactaagaagacttatgacaaatggaatgttcaatgctattctccttgtatgaacacccataaagtggggtaagttccctttatatagacacagcataacatctaatggagggaccgaccttgcccagttgagcatgtgttagggtaagtttgataataggactgactccttctttcagtcctgtccactctgagtgtcctctcccttgagaatttagtcttaattacctctcatgagcccatgcctttaagccagtgtactgtgctataaaataaaataaaacaaaataaaataaaattattgtctttctggtcccaaacagctatctggctcctccttgacccattgtttgtttgttttatgcttacaacaagccctaaagtttgtcttcatgggaaagaaagatctcttgtttatccataaatctttacttagtcttaattattaattgttgttttagatatggtccctaacctaactctactaatttttcctcatattcggagtcatataaaagaagcacattagcacagactatatagtccatgatcagccatcacctatcaactgcttaggacagcgcaaaggtggaagaaccggttgtcagctcagtaattgaaattcatacactgtaaattctccatccacaagctgtatccttgctatgattttaaataagctggagcaaaattactatcttcaggagaggttctccagttatgagctaagtgtaattcatatgtgtatgtgtttgtttgtgtgtgtgtgtgtgtgtgtgtgtgtgtgtgtgtttattgtttgagcagttgttgagttgattttcttaattatatctccattagattcataaaaagccagctaagacagtccaggtttcctagctgtaccacttcctgctataaaagatggatattcacaatgtgatcagaaaatgaatggaacagactgttccgttttaaaatatgatatataaatgagtgaaaatgccgaaataagctgagtgtgaggctgcatgcctataattccaacatgaggaggctgaggcaggaggatcaaaagttcaagaccttcctaggctacccaccaagactgtcaaaacaaacaaatgtgaaaatgacaggataaaatcatttttgtacaaataatacattccaccaacaacaaatgacaaggagaaggtgttcccctaagatatttataacagacatacaattagcaattgaaatcttcaaaggtcaagctcaggaaacaagtcagtgcccaagtggctccgagcaccatggatagatacagagcccagatccaaaggaaaggactgcttgttcctttagggctcaaactgagccctgggagagtagctttctctctgagctgctagcactaaattactgtaagccagcaagaaaatcctattctcaagtcactaaaatgtaaggtccatgaggctttgtccactcttaggcccccacagagaagaacagtgacaggaaagggcagttactcagcagatgtctggtgagtggatgaggcacctgcaggcaaaagagtcttgctcagagctttaggcctaaggcacgacaccaccactggaatttttaataacttcacacattgtgaatgcccccacattccttcaatgtatgtcggtgctaactgtaagatgaatggcagcaggtaatacagagaaaggaccagccagagagtacaggaagaggaatctcactcacacagaggtggagatggtgggactttagactgatagtctaaggatatttattagactcctatgatctgttcgttcccgcattagccaggccggaggaatctgagacagatgctctgggccctgctgattaggaagctcacaggtagtgctgtatgtaacgggcagattagtagcaaagttgggtaaaattttgtaaaaaattcaaaaagttaaactgaaaaagttttaaaatttcaatatttggtgtcacaatggcacaggttttgggagattgtgaagtgaacacatgaaactcctagctgggggatgggctctgtagtcttcaagaggaagcttcagctggacttgaaaggctccttaacagtttttaaggagaaagggggctctcatttggtgttccaagcagacagaaggttttatatatatatatatatatatatatatatatatatatatatatatatttatatttatatggaaatagaagacagaggtggagacccaactgtgaaagatctccatcatgctaatcagtcttttgtttgtcttgtttttgtttttgcaagtctggtacccaaccatcataatagagccattttgtagctggaagatatttctcaagtactaacttaaagactagaaatgataggaaccaaacagaggcgcttccatcatggtcactttaaggttggaataaccctaacctaataagaacctcttggtatgctttagcccttctaaggtcctgagtggccagacctacttttgatttcccattttgttggctcaagggagatttatctcatacattaggcttctaaaattatcatgtgagcctggcttggtagttcatgcttggtttttctaggccttgagagagggaggaagatcaggaggagttcaaggtaattttgaactgcatagtgagtttgaggccagccttggctataggagtcccatttagctctccatccatttctcaaagtgccttgtggttggaaatgacatcagaatacctataattcattgttaggatgtaagagaaaaagagcaaatgatttaaagtcctaaatgatactgtgaaaataaatacatgtatgcctcacattccttttgctaacagttgcaacagtaatgtgtcacgtgactagtatacgctagacattgtaccgagtactgagaaagccagtaagtttgtgaggttcagtttattttcagtgttgtgatcaagcctagaatctttatgttgttgtttccactcatataagtttttctctacttttctattgtttgaggatttcacacatacatagaattaaagtgttttgatcaaacccaccctactcccttccctccaattcctcccctagcctatctactgctttttcttcccagcttcatgtgctctttttccttaaacacactgagtctactaggcgctgtctgcatgtgcatgggtgtaggatgggtgttctctcattcctgaagggtgtttgcatccctgaagaaaactgactcttcctctcccggaaggcatcagttgccaagagcgcctcagctaggagtgggacttcaggagcccctcccacatctatactgggaacttaactggcttggactcaagtcttaggcatgaagtcataacctcctccacgagttcacgtatgcaatggtgctgctgtgtccagataatactgtttcactgcagtgttcactacctctagtcctgcctccttttcctcagtgatccctgagctttggaggaaagggatgtgatatggatgtgataaggatttggaaaacagaaagccagttacaatataatagtacaagggggccatgttctcgttcctgcaagcagcagaactcggcagcttcagccatatggctctggctctagagttaagaattgaaggaactactgggacaattgatgctggttagctggagctaagaaatcagcaatgattaagaagagaccagcatcactcaagtgaaatcttctgggaattgttttctgggagcacaaagaagatgtgttccagagatagccaaggttctacctcatgctgctgctggatttggtaatgtgtaagagtcacccaggtgatacttattttgaaggcatgaggtgtcatgaagaacagctgaggtttggcactgtgagaggtcatggaaggacattggagaaggtgtagcctccgctttagttgatagcccaggactgaaggggtcatgcaaaggatttgaggcttggcaccatgaaaagagcctatgagaggctattggtgaagcctagttggagtggaataccccagtgtattggagatgtcaataccatgggatgatcaccaagaacagcagccgtagtcgagtggatcaacctgagcttagagtgctacagagggcagagctggagaagtgatgccagaccttaggaggagtccaaaagatcaagtggaatcccagacactgaaacaagaagctgtaacattgaaattgccttggagactcaaagatgttaaagatgccagagacatgagctgctaacagggagtggaaccagcccaggagaaagaagtttgttgcattcaacaaagatgaaaaaggagtggagatctgaagactgctttgacatcagccatggagatgcagagtttggaatttgcccagctggtttcctgtctttctttgaggattacagttaaacgattggatggatctcagaagagaccttgaactttggacttttaacattgttgagactgctatagactatgagaaccttgaaagttggactaaatgtattttgcattatgctatgtttaagtatggccccacatagactcatgtgtttgaacaagtctatgggggccagggagtggaatgtgatggtttatatattcttggaccagggaatggcaccatctggaggtgtggcctggttggaataggtgtgacctggttggagtaggtgtgtcactgtgggtgtgggcttaagactctcaccccagttgcctggaagtcagtcttccactaataacctttggatgaagacatagaactcttagctctgcctgtgccatgcctgcctggatactgccatgctcccaccttgatgataatggactgaacctctgaacctgtaagccagccccaattaaatgttggtttttattaaaaaaaaaaaaagactattccagtcttttatcctcatcctctgtacatttaccatctgtgagtctctgtgttgattgccatctactacaaaaagaagcttctgtgatgagggttgagaggtccactaatctattggtataaagataagaacttgggggcagtgtatttagtatgtccgtttggtagaataatgaatggaatcaagttccaccctagggcctatgatctagctggccacagggttttgactagagttatctgaaaaagagaaaacattgactaagaaaatgcctccataagatcctgctgtaaggcattttcttcattagtgattgattgggatatggggagaggcacaagcccattgtaggcagtgccatcccaagctgggtaagatcctgatgtaaggcattttcttaattagagattgattggggtatggagagagggacaagcccattgtaggcagtgccatcccaagctggtggtcctgtgttccataagaaagcaggattggcaagtcataaggagtaaagctgtaaatgtctgcattttccatggtgtctgcatcagctcctgcctccagcatcctgcccagttcaagttactgtcctggcttccttcaataattaacagtgatgtggacgtatcagccaaataaaccctttcctccccaagttgcttttggtcatagtgtttcatcacagcaacaggaaccctaactaagacacccagtttatggtaccaggcacaagctttgtcttgtagcgcaggctttaaatctaatcagatagtgactagttactcccataacatgcactctcttgtcaaggcatcctattgtagcccacagaggtcacagctgtgtaggacaattgattccttttctcccttggtaacttaagaggacctttcagcactaagaaatctagttgatggtgtcagataggagtggggatgacgtccaggttggtaccagtttgatttgtctatgtcctgtgactcaggtatgtagtatcttcagcagtaggatcttaccatcaagttccactgggtaaccaagaactatgacaatagccatttttgatgggggtggtgtttctattgagtcacactgaccaactagaaaggaggtcattcatacctgccactgggcttattatgatagcctgtggtgtctggaagacacgttgtcttcttcccgccccagtcagggggcattttagagtatccccctgaccctcctttcccttggccacactaagtgacacctgttggccttttcagcgtgtttgtagggttgtgttccatctttacaaagcaaggtgctatattctcctctgagcctcaggcaggcttctctcttcatcctatgatgagtagagcaagcacaggctgggccacccctctgcaggcatctggcaccttccttgtcatttttttatgctggttgtctttgcattttgaatctataagccataaatatttagcatattttctgtaaagcatagtacaaacaaccgttcaattaagttatataaaacacattagaaataggacatttgaaaatgaaacaggttctaccattcatctcattgagtgggatgtgtatgtctggcactgggtctaattccaaattctctcatttctctttagagaattctttacaacctcaagaaaagtgaggctgtaccctcaaatccatctgtctgtctgtctatctatctatcacctatttatttttgaggtgtgcatgccacagcatgtgtgtgatcagaggacattttctggagttggttatcttcttccaccatggtggattgcagggctcaaagacagatcattgtacaaggtatcagacacctttacccactgcgtcatctcattgacctttgaccgcaaatttgagcattggctccatcttttcaattgcttgttcattaatccaccccttcatttagtgtagagcatctataatataaaaaccttactggttgctcagagaatagaaagaccagtttcagccttggccccacgagaatataaaggccaattctactgctcagcttctctgtttggagccttagaatttctacatgccataatgaagttcaactttatgtctgagttggccgggtgttatgctatagttgattaataaaagatatagagaatgacctgagtttatacacatacacatacaacaattgtgttatgttgtacagcaactaatgagttgtcaagaataagttgtcaagtccagtagtaggatcagcaggtaattcacttgctaccaaaccttaacaacctgagttcgattcccaggacccacctgaggacaaggagagaaccgagttgttctatgacctcgacatgcatgtctggcatgtattcaccaataagtaaataagtaaatgctattaagggagaaatggaggtcagtcagtctccatggtgatggcaagggccaccatcacaggatagctgaacaaaactaagacagttccttgactagtattttaattcaacatgtatgcagtaccctggatctcatctgatagactgactgactgcctttgtccctggtcacatccactggtagctcagattgagtaccatgcttcaccaagaagtcaccagcctggccaaggtagctcagtgtggcttacacctgagttggtcaactcttttttttcttgggtagctttttaatgagaaccaaatcagataaactattgcttagttcctaggctcactacagacgcaatcaatcaatcaatcaatcaatcaatcaatcacatcctggtgtagtgttatgtcagggaacctggcttttctatgctggtcatctggttctcatgccccttggggctggagtttggagtaattattgaagcagtcttgagaaagctttaacccttgaaactatagctggttatcagcaggcataatgaaaaccaacttttagccagggtctcactaccaatggcagtttaagataactgtcaaaatcataatttatctcccactcctctccaagaagtaggaaactataattcacagatcatttctgctgttagaagcaacttgtgccctcaaattaagttagtcaccttccttttctggttgctcatctgctacctgggtgaaatgctcaaaagaaaccccacctggttggctgtttcagatttttcaagaaatgattccctctatgatgctatgcttcttagttgagtttggtgtaattattcatcctccatattaataagtatgagtcgaagctgaacaatcaagagaagacatctaaaattagccctggcctttgatcaactcatattaaaaaccataataggaatagagagagtgtagtcttagcccttggcctactggcaagcattcttacaatggtgagtgtacctgaagtttgtgacaagtgtgtactggggacatctttgtcaacatacgttggtaacacactgctttgggaaggtatgcttctatggctgtagtcagattgcattgggagctgtctgggagacaaagaggtaagaaaaaaaaaaaaaaggtgtatggaccccaagggacaggtgatggtataccaggctgtgagttccaccttcagggcaggaatctagaagagtgcagagactcatgagaaaagagatgatcctgttggccagtcactcttgctccaactacgtgtggctaggaaaggaaaccagctcccttggattggatgaaaaatattgattttttttcccctaactggaatttgacagggtcagttcatgtctgggttttcagcacttaaaacagggctcttttgtcttgggaggcggctggactggtttctcctccaggcaggtgcacagagggcggttattgtagcctgaaacacaaacaccgagcccctgcaccctgatccacacactctccagcatggctcaaggaagtaaaatgaacaatgactcttgcaacaggcaagcactgtaaatgccactcctgaatgaaatatttcttaaaacttggtatccgtaacttgatcggctcttaaaacttaattatatgtcaggggaaaggaagccattggctcctccagctgtccaggttgaacaagagcgcacaatggaccatatccgattcgcagccatacttaggtaatcagattaatatctcttgaattgaatttacccttttgatacggactctttcagctggcttgtttcacatctcaaattttgacaaagcctcacggcctttgagtaggtaccctgaaatctatatgcgggaagcctgtgttctttggagcagtttttgggacatgcaccaattaaatctgtttctggcacgcttttaatggcatactttcccccgagtcaacaaccgctccaaaatctgaggtcatttgtttaatttaaaagcaaaggttatggaacaaccactgcaggcttcacaagccaagtccccgtggctttgaaaggagggatgaggaaggggaaggctacataaactaggatacttatacacaaaataagttaagtactgtgtctctgtcaagtgagtatcaaacagggctagtccacgcccgccctgtcaacctcctttccctttcttttccaaccaatcccagagctctcttactccagagggagttccacacagttactgttgatcttgtaggacaaacatctggactggatttttgtcagctggagacgagagagaactgtaaatgatgctgtgactttttttcatccttattaaatttatttatagccagtctgaagccaggaagcctgcccgggcccttgattggatgttctcgaggaactcggggcagatggcattttccccttgttttctaaatagtatcgaagatagccttacataattcccagctcggccttgtttgtttgttaccacagaggacacaccattgggacattttgtgtgtcagaacacttccactgtgttagcttatccagcctgccttcctttctgtcagggggagaaggaagtgtgcctggtacagcgtttgacaaactgcactgatagaaagtctgtgtctggtttgagacgtgaaccagtgtcctggggcgtttctttgccagagaaactcaagttgggtcccattctatcttttccacctaacaaaccttcaaatcttaaggctgccacgtcaaacaaaaacaaacaaacaaacaaacaaacaaacgcccattcattttctcattactgaagataatacaaggctctacaagagatatttccaaatactttactctgcccttagaccatattacataacagtgtcttaggggttatgtaactatttaagaaacaaggcttccgacttagtcaaatgaagatttcttgtgggcccttcccggtacgatgacttgcgattatcccttgatttttctttcactggcatttgtaactgcattgtttatgtgctttgttttgttaaggcttgggaatgaagcctgctacccacagacattttcttctccagagtagactgttcagcttcctgccacccaagtcagccatcctctgaaccacggagcctaatattgcccatcttgctaagggttaatctctggtatgaaattgaatggaaaccaaatgcactcttattggaaaagcagccacggaggcccattcacaggcagtcctcagagggaagactcttaggaaacaaggggtctgcagcagtttctcagtctccactttttgtgaggttcctgtgtcaccagtagataggtgttcttagaaacgtcagcagattcttccaagagttatcttggttgtggaatagggaagccattcttagagcaaaactcaggttggccctgtgtccgttggtctgatggaaagcttcatcaagtgagggtgtctgctctctactgttgagccagctcaactgtgtgacactggccctggcactgaaagtagccacagggtggccgttattcattcttatctcagttcggaacactgagtcataaaaggggagagccaaaggtaaaaatgtttgttatcaagtaggaaggaaagacagacacagagatgaaatgcagaggaaggtgaggcgtggagttgggaccagatggactgtaagcagcactgaatctttcaagattgtaaggctgcattgttcctgctaggtttagcttcagtgttttcagagatgaaaagtaccgatttggtgaaggggaaagagttctgtctatgcttagaaccatctacatagtcttcatcattattatcatcatcattatcttttatgaaatctccctaaagaagggttctttctttctttctttctttctttctttctttctttctttctttcttccttccttccttccttccttccttcctttcttccttccttccttccttccttccttccttcctttctttcttccttccttccttccttccttccttccttcctttcttcctttcttcctttctttcttccttcctttcttccttccttcctttctttctttctttctttctttctttcttccttccttccttccttccttccttccttccttcctttcttccttccttccttccttccttcctttctttctttcttccttcctttcttccttccttccttcctttcttcctttcttcctttctttcttccttcctttcttccttccttccttcctttctttcttcctttcttcctttctttcttccttcctttcttccttccttccttccttccttcctttctttctttctttcttccttccttccttccttcctttctttctttctttctttctttctttctttctttctttctttctttctgtattggaattaaacccatggccttggcacactctgtccactctgaagcatcccagcacccacacccacagcactgagctatatcccacatacctctctttttatttactttattttattttgtgtgtatgagtgttttgcctgtgcatgagtagatgtgctatatgtatatctgatgcccacagaagccagaagagggctctggatcacctggaactagagttacagatggtcctttgcaagaacaatgcgtgttcttacaaacacgccatctctctagcacccctacctcctcatcctccactttttgaggcagtagctcactgatttcccaggctgagctggaagttcttacacagcccaggccggctgtgagcttgcagtctgcctgcttcagccttctgaatcgtcaggattccagtcttgtgacaccatacccaagaaagcagcattttaaaatattttttaagagagaaagagagagagagagtgaatatttatagaggtcaaaggacagctttgtggagtcggttctgtccacctatctttttgtgggtcatggaattgaacctaggtcagtagacttacagagccagccagctctttacccactaagccatcttaccagcctcaaagcagtacttctaaatgcattgctattgctgtaaaagatcctagctaatggagttaaaatgtctatcaaagatatgagcctgaacgagcatggcagtgttagatactgatgaagttattccctctccaagggaaaaaaaaaggtgaatggtggtgtatctatcacctcaggagcagcatctcccatcactgccatgcctgacaaggctccagcatgattacagctggaaaagagggcaggagttaaaggagcaataagtagatatttggcaccaaacattcaacatgtggaccctgtgaaacttgacactgttatttttgctcatgttgagcatatcacacattcatttatggaggtacctattctccatctaaaaatgtccaactccgtatgggacagcaacgcagtggagggtaaatatggttttgttctgcattttagctgatgaacggtatatcctactcaagcgtaagctataaacactgtggtgagattactcagaacatcagcactaaccatacccacattagtgagaaaagcgtggtgcacttttgggagcctcccagccgcctgtgtccctgtgtgtgcaaagcagagtagagaactcatctactgttctccctgccgccgttccactgaaaacacattacaatccaaagcccagaaggaaaaggctctgttgctgtctctttgtcccacccagccattgaggcaagatgggaaggaaagatcagtctttatggaccatgaagatacactcctccccaccctcattcgcccaccactgtgtacctgtcattgagtgcctggtgtcaggtacactaagaagaaagcggggagcggtaggagaagaacaaggggcagaaagaaaagacagctcagctctggcctttagtcaactggccctaacctcagttatgtgagaatccctcattagcagttcttttctctctgcagcacgttcatctccagcctagtcctgcagctttcagtgtctccctttctacagcttgttctgtctgatttactcggtgatgtcatagctttcctatttttagaatgagtggaagataaaatgttcctaagagcaacttggatggtattgaaagcattaggaaagaagtgtggcgggcattgttagcaaacagctgggctataaacactaagcatgagaaatgacggttaaggccaatgggctatctacacgaaaggcctgtgtttgaagagcctcggaaactctcatggctggaacatctggtagtgtcagaacctggggtggccgagatcagaggctgctgatttctggcccctatggatcagtgaaccctttcagagtttacggggaaagggtagggtgtgagttttaggtctttgatcactgtgtgtgtgtgtgtgtgtgtgtgtgtgtgtgtgtgtgtgtccgtatgcgtgcctttgtgcctctgtgggtgcaatgatccatgttggactcttggaggataactgtagaggcagttcttcccttacacctcagggaccaaactcaggttgccaggcttgtgtagaactttcaccctgagcggtcttgccagtccctttgctagtttcttatttaaaatgttgattctgttccaagcagctgattccaattgtacttgcttctacctgttgactcgggtgttctgcatgggaaccgcactgcatggccatggggccttcccatctgcctcctttgtgaatctctctttcagtgcctccaacttgggccccaaagagggatacagcagctgaatgtcattctcttgggccttggcccaggcatgcatctctggaaggatgactgaatcccattcttacggctgaagttcctcttgattagcagccccttttgtgtgttgttcttaacagggcctctgtctctcatgggtagcttacagggatgtgtttgagagttccttccagctgggaagctgcccagctcccaccagctgagttgggggatggcttccctttagttccgctgcctgtggactacaaggaccccacttccagcctggccacagtggcccttttctgctgtgcagatttggctctgtattccggttttcattctccagccatctgggcattttgagcatccctcttatcttagtaccttggcactcaggaccacatgtcatcctaccacagagatggaaacaaaggaagccttcacctctggcttacagttcccctggagtcatcataggttgagtgacagtcggggagattgtgagagctgcatagatctgcagtgatgtaaatggttttgctgatagaaagcacacacagtggatgacaatagccatgattgttcagtaccagggttcttagcttccttcttttttccctcggctaatttgaaatctaggagaaagaaaaataaaggccctggtggcctccgattgctacagccttgtcagacctagaagagtaagctcaggactgggtatgtcatacaagtgaaatagagctctctcttaaagattctggagactagtgagcaggcaggggagacatccttattaataatgtgattgtccaagtgcgagactcctccatcactctcagggtgagatttccccaattgtgggaatctcgattttatgagtttagtggtgaactccattctctctcttgccccatttatgaaagagagaaaggaagaaagaaagacagaaagaaagagcaagaaaggaaggagagagagagagagagagagagagagagactggtcagtggtagtgtgcttgccctggttggagcgccagcaccattccctgctttttaaaactcctcttttttttttcttcttcaacttctggtttgggaaaggttggatcagaatcactcttcagagaagcatctggaaaaattagttcaagcatactaatgacaagctcgctataattgtcttaactagagaaaaataagcctgtgccannnnnnnnnnnnnnnnnnnnctacccccacccccaccccagcctctgtctctcatgcattcattctgatcctcagccctgcccaaatacctcttggaggagaggttaacaaaacagcctcagactgtctctcaggatgcctcgcagtccgggaggtcggaaatgcccttaaaggtagtctctcatgtgtttgtgtctttcagagagtctgatttcacattagtggctgatcgtttagttcctagcatttatgtatggtagaaaactcaacttctgcatacttgatgctacagcgcagtatgatgttaagatattactttgctttggggcagaaggcagtgccacctcattccataccaaattggtgggccttgtttttgttttgatactggttgaaaccacagagacaaagggaaggctaagagttcattcttgattatccttttgagtccaaggttccatcctctagtctctgtgacaggcaatggtggtcactatcctagaaaaccaatttccaatttccaatttagccagaatcacgggttctaaattgggcttctgttctcaacccaaaactgccaccaatacttgtcaaaacccagagagcgttctgtaaaaagctagctaatgacagtaggtctgggttcacacacagcttctggccttcaccttgctttactccctatatctcagtcctcaagtgaggatcaggtctccacatggaaaactgacttcctcatttttttaagttggctcactttctgtctaagaatcagccactcttcatctctggcattgtgtctgaacaagcaaacctgttcagaatatagaatttttgctcccaaagcacagagctgattcagtgacctctgcgaatctgtaagtgaagaaggaatgcagagtctctggcacaagttggttctaccacatggtttgaggtaaatggccattctatttcccattaggaagggtttggagcagcttggcaacagatctgtggctgagtaattaatctaagaactatagctctattccacataggagattaaatgcctgctttgggtcacatcaaagctggcctcttgtactatctgatctttgcaaaagtccccatgttggaccagcatgacagtctttacgtgtgttgctccctctgttataaaagagtgagtgtaaataatttagagttttactcacactaatattaaaacaagtcactgtcttccggagttgatgtaaagtcagcactacaaggaatttgagtcaaaacagtcctactgctctttgggtagtatatcttaaacatgagtgacattttagcaaatagagtttatcagcccatccttcatttccttgactctcattgagactgtttaggtacaggctctctattctccatctgtaaaatggaaaaaatcagagcaccatgctcaacttagatggatgacaacaaggactgcaggcattgactgagctgtgctgccacagaccttctacatttgtaacgactgcatttttgcctatacccaagggaatctgagcagtgcacaatcctgggcagggtgcaggaggtccacagccaggttgaactgggcaaacaaatggagctggttccagtttaccaaccgggcacaggttatgtgctggtcaagagaatgtttttcaaatcatggggaaccactggtacaaatccactggtactttgatggtggcctttggaggtgctttaatgatttgaagccgttccatggcaggcccagggaaaggtcttcctttagccaacatgcaatattaggcagaagaaatagagcctttctggctgattggctgtgggtgggccttttccacatgtttctaattagggatacaagaaagagtagatattctgtggcgactctcctttccctctttgctatgagacagaacaacagtgcctttgtggtgacctttgtagagctgtttacatttggtgacctgcctgcacactcccactagagtggactcacctccaggctaacaaggagcaaccgggctatctcttgctctggtaggagcagaggagtcaaaatgaaaattaaaaggattctctgtttagacacttaattttttatatagatttattgaggtctaatgtatataccatgaaattcatccattgtaagtatacaattgagtgattttttttaagtaaatttatggagcctcaatccaattttagaactttagctggactgatttcagaaataccagcaatcgtaattggaatggaagccgagctgaagtgcagagtaaagtctgtctagggaggggccacccaggaagtcacttgagacatctagtctcaagcccagagtacacaacgtcctaagattaacatttacatataggaagatttttcagtaagtttgctttccaaatgacaggacatcattaaaaatactgagcagttgtttgctgcagaactccccttacatgtcaacatctgtttacgttgcctgattataaagaggatgtacagaaaatgaaaattcaagctctcctcagtgagtttatgtgtcactttaaacgtctgatcaagcttttatccacgtgtctacttaggtacgtctctcctcaggcactgctaacactcagtgaaacaaggtacttaccttccagagacaatgggtcggtggcctatgtggtcatttcaatatgacatcatgagttttgccatagactgcatggaattgaaaagtcttctgtaaagacctcttagagatgttactaaaagaaaaagatggcttggtagctaaaagcactggcttctctcgaggaagacctgggttcaactcccaaccatgtaagcccccctcaactgtctgtaactccagttccaaaagatccaacaccctcttctggccttttctggaactgtgtgcgtataatagacttacatacatgcaggcaaaaacacttacataagtttttaaaaaataaaactatctaattaattaaaaaataaaataaaaggcatttctttgagtaggaaatgatttgtccaggctggtaagctggactagttcttctgtttgtctagttgtgctgggttgtggacccttgtgtcctggccctgaagttcagcattatcctttcaacaagaaaaggacagcaatgtcaactgctgaccttctagagtacaatctcattcttgagtagctttaggaaaaaaaaaaaagatatgagaagataaacaaaacaactacagaatgtgtttgcttaaaagtgctagggccctacagtgtgaatatttctaaatttaagatgatgaagaacttagagttgttcagagatatttggaaagtagggatatctttggctcccagtcagaaatgggatgaattcagctggtttcgatgttaccaaggaagagggagttttgtatttgtttgctggcccacctactgtgtggtcttgtttatgacgtggctaacctctctctgggattattgtgaatggccctatctcagtgagagctagacacagtggccaataccattgaacattgccctttgagtctcaaaggttgatttcatagtatttagtggtattttacctgccaaagaaagtactgcttcatttaggggaatgtagtttttattttttcatagagaataaggaagagagattttttagaagaacatatcttatcctattggccttctagacaagctaaaaatgtaagtgccagtaatcttaaaaatgtcatgtcttaaatgtcaacctaccaataattatttagatgccatcagaggggaagtcccctcccttttttttttttaaatctgtactaagatgaaatttttaaaaaaaaattttaattaagaaaattccagtgtgggtaagtaatttttttaaaccaaacacaagaaaagtctatgaaattagaactgccttactaaaaaataacagtcctggaaattgtgtggagttttgttttgttcttgtatcttactttccaatgcaacactaattgtggatggggagagtaggtgagcgttgttactctgcgtgttaaaaagggcaaggttttggacactgtcaagatttgtcaaatacaattcagggtgctcagtgaaattataattttagagaaaccaaccacacagaattagtttaaaatacatcccagctcttagattggggatgtacctatactaaaaaaaaaaaaaaaaaaaaaaaaaacaacaaacctttcattgcctgattgcctgagttgtgttcatttatttattttattctagccaaggtctcatgtaacccaaaccagcttcagacttgcaatgtagccaggtcttaaacttatgatcctcctgtctctacctcccaagtgctgggattacaggcatgggctaccaaggctagcattatctgaaatataaatttaattgagctgtatatatttatttttgattaatctggcaccttttttgttatggtacttttacaattaaaaaatgtatatataccacccaagaagcttaggaaagttttacaattattgaaagccactatcaagcttaagctaaagcaaaacatagtaactaaaactgtgaaccaagccagttgtctcggtgacatgaatcctctcaccccaactacttcctgtggctggctctaggagtccatttctgtgggggggaaaaagccttcttactattaattgtagaccctttgggtggctgagctcagactgtggctccttttgaatgtcagtgttcttgacctccttagaatagttctggaccctcctaaattcttgcttctgtaaactcagctcagtgaggtggggtcccactagaggtgtctcagagaataataatagctgtcatttatgagtgattaatatgccagtgctttacctccactgtctacatctaactacaggagtttctatgttaaatggatgtaatttcagttttagaaacaaggcaatgaaggactctggaggtttagtaacttgagccattgcaaaacagaggcagggtaaggatttccggcagccgagtgcctctgctcaccaatgtgctgctctgggtcctaccctcggagccctgcttttctactcgctcctcaagccctggcttggcttgtccttcctttctatccttgtcccttattggttagaactgatagagaacttctcatccagaactgacgcgacacagtctttgtctctgtgtgcagtaacacagcaaaccagaagtctgagcacaacagaaggttaaactgaatgctcccctgttgtgtgtgaaaatgcttaaaccgaaagaaacaaaaagcccaggatcttgatttgaacactgtttagagtggctgtgttttgccatctgtggtagtttggataggaatggcctctataggatcacatatttgaatacttgatcacgggggagtgacactatttgactgggattaggaggtgtggccttgttggaggaagtgtgtcactagggatgggctttggggtttcatatgttccagccaggcccagtgtctcaccctgctgcctgtgtatccagatgaggagctcttggctcttctgcaccgtgtctgcctgtgtgccaccatgcttcctgccaattaactaaacctctgaaactgtaagccagccctagtaaaatgatttcctttataagagatgctgtggtcatggtgtctcttcccagcaataagacattgacttaaagagcctggaggctccctgtggagcagcatactttaagtagttaccagctccaagatgccctgaccaggaaatcacatgattgggtaaaaatggtgtctgctctaattgccgggtgtctgtagctctcagccaagggaaaaggcccttatttgctgccccagccactctgccctctcagcattcctcttggttaagagtaccaaaagatatgtaccaccaaacaccacgttcgttcgttttaaaattaacacatcctctcttgtttactccctatgtaaaataactagtctgcatgttggtcttattgtgtaaaaagtgctacttgctccagttggaaaatttcatgaagttagccattccaccccgtcatctgctgtggccacaagtcgttaagtgtcaaacatctccctgggagtggtctaccatgtatcaaaatgacagttcttaaacttgtgggttgtgaacccaaaggtctgggggaaatttctcctcgggtcacaggagtgcacagtgcaagttttcccagcccttcatgaactcacagccggtctctcatctggcttccagtgcaatagtgcagcaagccctaccttccttgtccaccctcacccggcagcaaacacctccttctttgcctggtgccccacagttcatccaattcaaaaagaaagtctaaggcaaacaatgggaaatggacttagggatggtgaggcataaagttacattgtaccctgctttagccctacaacctgaaaagaggcaatctctctcttgtcaaacactagccttggttgcccctcccctctggctctgctccgcccctccccactggcccctctccttgcacactgccttcctttgctaaccatctgacaatgtagctctgagttggtcactttatatactttgtttcctccatttgagcactggaatgcaattgccacaggggctttggggaccagtttagtaagtggtagtcttagaagatttcaaacggcacagagaagacactattgattggtccttgctctcctctctctgttgcctcttgagcggctcagcaatgtcagggtttgatccacagccagcaggagaagcagcagcagtgaagacctttaaagtggtcattctggctccaaagtgacactgtgaggagccaatgagttaacatttagcaattctctaagagcatactttgtatannnnnnnnnnnnnnnnnnnnnnnnnnnnnnnnnnnnnnnnnnnnnnnnnnnnnnnnnnnnnnnnnnnnnnnnnnnnnnnnnnnnnnnnnnnnnnnnnnnnnnnnnnnnnnnnnnnnnnnnnnnnnnnnnnnnnnnnnnnnnnnnnnnnnnnnnnnnnnnnnnnnnnnnnnnnnnnnnnnnnnnnnnnnnnnnnnnnnnnnnnnnnnnnnnnnnnnnnnnnnnnnnnnnnnnnnnnnnnnnnnnnnnnnnnnnnnnnnnnnnnnnnnnnnnnnnaggaaggaggaggagaatgttcatcctttatgcctgaaagaacagcattgaacttctgcctggttgtttataggtccaaacaagaagcaagtagccatttgcaaggatttgaagggcatggtgcacaattttgctcaaggattttgacagtctgtccagccttagtgtattttgacgtcatctctactccagcttcccactggcctttctttccttccttcccctccacatgtgtctattgctgttgctgcctcttcttcagttacagccaccagtataggcgctctgtctgttagcacgagggccaccaggcttctgtttaagcacaaagttctctcccctttaggttgcgcatcctattgaggtatgaggcctacgtctctgatcattatgccattctgcaagctttgtactgaagtgatatagctcacatgcggtagagtctagctatatgttttgattgtctaacctgagcttgagcagagtgggaaaagtttggtctagatccatctgaggggcagctaatagccagcatcttgcttccgggtttcccagatgcactcagtagaaaggcaaaaccctcctgacagtttgtgttgtgacagttcagccaccagtagaggcctccgtaggaacagccacttcaaagttggtggtgtgagggggtgactgggatttgtgtgtggagcgatgggaggaacgtctgcaagcagggagcatagggtttaaccatgcatgattacccagagtgcagtgccttgacaagctggttaaaatgtacctcatataacaatgtgaagggctgcccctggaaaggctacagcttcacaggccaaggggtcaaagtaagtaagcacggaactggtgggacccgtggacctctgtgcaaaggtgcactgcggatgcaagcagggaaaacatggtgtgtgcgttggtggctcactgtggcagtccagaaatgtgctcatttatatgtaggcttttccaaataaataaataaaacacgcaggagaaaatgcttttctagaagcaaattctgccactgctacacactggcacatatgtcctcactgccataaacgtacctatgcaaactcacgcagccatgtaccttcccatgatggagatcaagttgggaaacatgactgagtgaattgaaaagtattgtgctctaatcccagcggttttgatccaaaccaaaaccttatcctccagtgcatgaggataactaggtaaagcagatacaaaacacacttctatgaaaatagcttgaaattggaaagaggcggcgcacacctttaatctcagcacttgggaggcagagacagggggatctctgagtcaaggccagcctggtctacagagtgagttccaggacagctaaggatacacagagaaaccctgtctcaaaaagcaaagcacataaaagtatgtgctcatgctctggactttggggatacttttgctgtttgttagctgatggctttaacaaccttcaccagtagattggcacatgaggatttcagaaggaagaggctggtgtagactcttgcttttataggtcagcctttagctgcatacaggcaaatgctgcttttctccaggcacagcacagtgatgtgatccatggacctcctgactcagaagcctgaggaacccatggggtttggaaaagggagactggagggaggtagtatgcagatgagcctggtgccagcatcagctggacagccggaggcagatgagctctgttcttagtgccaccaacgaccattcagagatgtaaagtatacatgaagcactaatgattagatatccagagatgtgagcagtcttcttttgttccttcatccttcagtaaatcctgcagtatttactatgtaccaaacacaggccgtcaaatccaagatctaggtctgccagataggaggcacagaataaacaaaaaaagttgtcagggaaatctagctaatcagagaaagtgatgtgtagatgctcaacatcctctcagagtgaagcaggaacagagacatctgaatattctagctttacctttaaccatgagctctacatactaagagaacatgcagaaagagcccagaggccctgttgaccagaggagtccattgtgagtccttagaagctacacaggcagcccaaaacatcagggaagaagctgagaaagaattggcccaggtatgtccagtcactagtgtcacctggagttcactgagttctggagaatgaaaacagtcatgcttactgacttgtatccaacatcccagtacatgtagttttggtagttctcaaataacacctggttttctattgtaaagtccactgaagtgatattatgatggatcatccaagcccaggaagacttagaaaatcctgtgattcccagcatacacacacatctgggctgccacttgatgcagcttccaggtgtcatcttacagattttgtttatccctgctatcatggataccatagagtcttatcgtcagtttcagagtagcttgtctctctcaaaatcctatgcttcttgccctattcatctctttgtctctaatacctgccacagagtccagcacacaggtccagaatggggactggtccttttgagatggactagcctcttagagacctaagctgacactggactagatggtgcctgctctggttgtcaagctgcatcttctgattgcatgaaagactataacatacaacctccatatcatgtaatgaaatatttaagagggagactttaacctcatactgtagattcatgatgactctatctctttttcactaattgctttgctttttcatttctccccattaatttttttatcactgtatttctgttcaagtttggttttcttgtagattataaacttctcagctgcctttggcctgtctgtttatattgatctcagtaggccagatgctccaccacagttgtctttcactcttgcagatggtctcattgatgtaagtgaagccccctctgttcctgcgacttttctaaggaaaactgtttatgatgcgatgggtctctcagggcagctagcatagtacctgatctgccgctcagtgttcaacaagtgcatccaataaaggactgtgcaagtagtgggttgttagtggctgcagaaaaccaggtacaagatcaagcatttggtcggggctgcagagctcaaaatcaaggctactaaagtttctggcatcttctttatatgaaaggtgatccaagttgagcattccttattcaaaatctgaaatgctccaaaatctatgacttttgaatgtcagcatgataccagataattctactcctgacctcaaagtcaaaatacaggcaagtaaaaagttatataaagcatctcaggctctgtgtataaagtatacgtgaagcacagatgggtcgcatgcttagtcagttcctctttgccattcttagggagtctgggctggaatgcgtcttttcagattccctttagagtactttatgttctgcccttttccacatcagaactgtccgctccggatgacatagaacatctcagctattttttttaacctgtagtccttgagctgtgtttatcttttgatgtggagaaggtacatagctttcatcagaatgtcaaaggggaagtccacattccaaaaataggtcaaaacccaccgcagagacatcactggtgttctgttaagaggagtgaagctggccatggtagtacagccctattatcccagcactcaaaagacaggacgatggggtcagctagggatgcatagcaagtttgaagccagtctgggcgatgttaaggagaccttgcctcaaattaaatgaaaaaataagataagaataaaagacaagggtgggagagaagccgaggacacagcacacaggcacagctgaagttcacaaccacagcttcacatagcacttttactatctcgtggacctcagacttcgataccataactcacgtcagcaggtgtttccacagagctcactaagttgtgctcgttgtggggactaggtgagcagggttccttcctttacaagtactcactggggtattgctcttcctcaccttcattaaatagtaatatttaataatttaatagtgttggttaactgatcttacccagcgctcagtactgtcctgggcagtattagcaagtgctacttgcaccaccactgttgaaaagaatgggtagcaagttttgaggacaggcaggaatttgagggaaggagagggggaagctggcatggactactgtgataaaaggcaagcatcccaggtcctaggcttctgcatctctgtgggtagaaggtctttttgagcagagtcttccttgtggctggggttggcctgcattcagttccaataaaaatagatgtcaggagtagacagaagaagaggtacaggttgccattagaacattttctatagcatgattcttcaactaaatgctattactattatcctatcagctagaatgttatcaggaaagagattgggtaagctaattggttcagcagacttgtgtaatctggggagtgcattcaaggaatgggtagctatgaagaaacttctagaactgtacagtgttttagaggtacttacaagtgatctccatcagcacccctgactgagggtgacctccttcctgtctcctgctaatgttctccaggggtcgtggccaggagagtcctcttaaggtgatccacagaacacaaaggcagaggtggggtggagaaggaaccagagtagaactggagggacacacaggccatgtctgacaggtttgcttttattcttgattctagaggtaaatatgtgtgcttccattttacctctttgggaaagcttcagttttaatagcttctgtcatagctgttacactatcaatttgatgatctcagatatcttgctttctgactagttttgttttgttttctagagacaattatgtataaactaacctcttttcttcctgagcaaacaaacaataaaaatatttttctttggaaacattgcttcttacaaatggcctcgctccatttccttctgtgtgtctctcctctgctttctccccctgtgtttagactcagagcatattacctttggacacatccagcaatgtcctgtggggatccaactaaagtccctggttctcttttgtgttcaatactaaaggtcatactgcccagtaaggttatttttattatttagagatattttttataattaatctaagactctacatccttcctaatgctataacttcttaatatagttcctcatgacatggtgaacccccaatcataaaattattttgttgctacttagtaattgtaatttcactactattgtgaatcataaagtaaatatctttgttttctgataatttgggggggaggacactactcatgggttgagaaccactattctacatggaacccaaggtaaacagactgcagttatttcactttctaagtactacaattactaagtactacaattactaagtactacaagtacaaatcatgaaagtattattaaaacagagtagaatagtcattatttaaacatcagcttatagttgcaaaagtatatatgcactgtaaaaggtacaatgaagtaaaatctaaaagccaaccaatgtgccttactaaacacacttatggcacattagacacatttttattagttttatgataggatttttagtctaattacttcctttcccacatttcttttattaccagtatttggcaagaagtcacttgaatgactttcaaaaggtagtgttttcttgtcttctgtctagacatacaatgtgtctgctaactctgcctagagcctcataggcacttacttacctatgacgtctgtcccttcctcctgtccaatggacaccatgtacattagtccagtcttggtctgtggccaccctgcagaagttcgctcagaacattactgattccggcaacagtataatcccctttgtaatgctacaaaagtctgtctctcttaattcttaggtttccctccctgattaagagaatttttgtcttctcagactagtctctgcattccaatgtcctttgtaacccaacattttctcctgtgctcttctggatggtgctatcattagccagaagagttagaggtccactgataatactgagttagtggttggactcattcttttactggtcatcctataccatagactctgagacagtcataagacactaagggcatgctataggctggctctgaatctagaccaaccagtcagggtttccgggtgtttggctttggaatgaatatatgacccaaactgagaacatgaaactttattacaagaatttagtcagaaccaccaggaagaaggacccttcagtctaccatataccaacctggtgggatatagtgttggtcatactttggaagagcctgcctgagtacattcacatactgcaaagcagaggtttaaggtagggaagggttcccacatttatctgtctcactcagatgcttggtggtaaggcccgttagggctgtccctaaccctactgttgctttgcctaccaaatcaacctgagtatatgcactgtcgcttataacccagattcatatctgagaattcaacactttctgaattcatagtcccaccaataccataagcctctgtactaaggccattgtgttacttgttgattgctctgacaattctgaacaaaacaatggaaaggggcttatttatcttgactcattgttgcagagattttagtctgtaatctttggttctgttgattctgggcccatagcaagacagatattcatgagagtaggagtaagagacagaggctgcccagctcggggccaacagagagccacgtagaacaagatgtagcctctaaggacatacccctagtagtctgctttctgtgcctagtctttatctcctaaaattctcgaaacctccgagaatagcacaaccagctaggaactaagcttttaacaatgagttgttttgctttggtttggatttttggttttgctatttttgttgtttgttttgctttttggttttggttttttggtgggtttttgttgttgttgttttgttttgttttgttttgttttgcagggacactttatactcaaaccataacagtcagtttgaattgggaattccagaaagctacagagagtactcttctttttcttcagtttcagagagcacaatgacatacacatggaatgcaggaattccaagaacaagcttaggcctagtaacacaatatgtcgctgactgtgtggagcatctgcaattaaatgtagtctcccaccgtactgggggaggaatccaggaggacccacccaaaactccacaaataccaaagacctcttgcataaaatgatgcagtatttgcatataacctaggcacttcctcttgcacattttaaatcatctctaaattacttataaagacataataggatgcaaatgatatgcaaatagttgttctactgtattgattaagggataatggcaagaaaaaggtctgtatgcattcagtacagatgttcccccccccccccaagtattttcagtccacagttggttgaatccatagatgcagaaccagtccatatggagaaccaactggcattaaaaccctgggagtccagattttgctttctacaaaacattctaacggagttaaatattttttaattttaaataagctaatgttaaaaatgtccttataaaagaaattctaaggatcaattatgctttttttttaaagcaacactttaaagtcaaattcttgtaaagaaaaagatatccagatgttttctgcttctactgagtgtgaagggctgatattggtttgtaaagtaaataaataaattaattttttttaaaaaggaaagaaatgggatgagagagagataggtggctgaagacatttcctttcgatgaaagagcattttcagggagatcggattctgaaaccaggtgagaacttatactttgaggttcatcttcccagagattctctgtcagcagaagaggatccagctgagatgagggagcactggctgctctgctagggatgcacctctgcctggagtgactcccagcgcttcctgggaagaggcagatgctgtgtgaacaaacagcaaattggggggggggggtgctatgaaaaaaaggtctgtatgcattcagtacagatgtttgattttaaacgggatgaggggctttttgttttgtactctttcagtttaccttctgggcagcattcaagtggggaaagccagggactagctgagccatagtagcaatgttctggcattgcttaagtaaatgggttccatattgagttgagggcatctaatgtcgtctctaagagggagcagccatatttctttctgtaacttagtctgccctgggctccagacacttggggaaaagaaagagtccagttacaggattcagtctcattttctatatgggaaagtttacagaataaaagctttgccattattattgcttggctggatctaagcttatttaaaatctaaagttaaaaaactatttgaagctgtttgttgctccacactgttctatactagtcaactatttcattaagttctagcatgcggtgctcagcatgctttgtagaggtagcagcttccctcactgtagcacttcatgcgtccacataaccatcagttagctatacaacatcagtcttctacttcctgggccaggaggatcccatacgagcagtcatcccccagttgtggagcccacatctgcacttgaaagtatctaggagggttgtcgacccctagaggactatatcaagcttatcatcccttattctgaataggttcaggtgatggggtgatgctatccgggtttgtagtttccaagtcacagggaataactgggaagagaaaagagtatcaattttgtaaatttgctttgagggagagtttgctgcagatggtgattttgatgggaaagaactttacagtgccccattcattcctactttccaattgagctaagaaaaaaaaaaaagaacttcgaaacaaaagcaaacacacaaaactctcctacacaaaaagcctgagtaaaatgcttcgttcaatacacttaccattaaaaaaatgttgggaaccaaggaaccagtttctaaatgtatttctatacttgccctctgaatcccgtcttgctgaaaacttcaagatatcaaattctcttccataatttcctttcaacagaacctaccatattacctacctatcccccaagcataaatggctaaaacagctgcctctttcattctggtatatacatacaaacacaaatgagatacaccccgtccatgtataatataaatttctgcatacgtaaacacactttagtcatttattttttagtcattaatcaaaatacaattcattttaagagtacggtcttgacatgagatcattagttcagggaaacccaaggagactgaactacttttgataatatcgttttcttgcaaactgcctatgtgctgtacaaatcttctccaccgagaaccctggagacagcacccaggagcagcctcttacccacatgttaaaagatgtaagttcgcctggtgaaggagcaaacaccatagattgaagataagctgtggcgtcattgtgtttgtaagacgaggctctccctagttagccctggctcagagaaaccaacgatatgctttatctctcagaattgaaatatggagaatcgggagaataaacctaaggatcctctgcttgctccagtttggctttctttcattttaacattgtgtaagctgaggagaaagatttccaagtcatctcgtctatttctgaactcttccatgaaggatcaagaacacccgggctatatcgccttcttcctgggatccatgggtgattgtgaatggttggtccagggctctccttcctacacccaaggaacaagcttcaagtagcagattgaccaggatggtggttaggcaaatcaagggtggccaggagcctgtccacccagaaaggcaggcagttagcaggctcctccacaggatagctgcccgtgcccctctgcttttactggaagactctgccaagaagccagccactgaacaaatgtgtccagcaaatggtagctgctatcattacatcatctgtagagccattgaggaagccaaagacttaataatatcccttccatctattgccttaaatcacatacttacctctcaagactgccagtaacgtggttgtgctggacttgcatgagtctgttttacagtcaagaaacgtaaggtcacgtgtcttcacaagaacagtgttctaaatgcaccccagtggctacaggtccttcttattatagttcattccatgcttactcagcttttggaacatacagggctatccatgacaagtaagatggccagaagtagaggacccagtccttgggggtctgactgtccaaaatccagacttctgtcgcaatggactctgaatgcaagttatgtaggttctgaaggaaggtggtaccccaacctctgtagtcattttcatggaaatgccttgagccgtaatataataataataatgcagagctcagctctcgacagatttgctctgttctctgggtgaggcctctcagtcctcagtcacctttgctttccctgtgacaactctgaagccaaactgttacttctgacaagtctttcagacaccagctgtgcactgggaagaattcattcccgtggcctgcaaggacgctacccatatcattatttgtttctggattagaagcaaacaatgtaattcttaaatgctgaagttgggagttagtgacatcactcaatgggtaaaggcatttgccactaagccacctgaattctatccccgagaatagaattttccctatggtagaaaaagaaaattgactcccacaagttttcctctgacctccaacacccatgtcctggtatgtgggtgtatagcacacacgcgcacacacacacacacacacaataaatttttaacaaatcaaatttccttcattcagttgtttaaaatgctttgcttttgttttgaataaacattctagtaatttttctcatctgcttcaaaaaatgatctatgttctagccctacagtaaattcctttgttaaagtaataagagggtgatttcactgcagtttacttactaatttattccacagtttgggtgttaatcttgctgtcagatgaatgcaatcagattttggactggatttcttcctgtgtgtggagggggggtggatttttatagcacattctcctgtaattgccttttgcacacacacccaatgtctcattttcaagaggacccagccaaacccatcatggcctataattaacaactaaataatatttttaaagatctgatgccatgcacaaaagttatttgagttaaaatctcagtttatttccttttgcttttattctatgacaaggtctcactttgtagcatagattggccttggaactcaactatccccctgcctcagcttcctgagtgctgtggttgcactcagtactccccgagtgatagctcattggtatgtaaacgagatagttatttcagctctttggatgcttaagtctttcctaaggtggatggctgaggttgcctgctatggtcagtgtcaaagtcgatgctgagatgaaccatggtagccctcaggtggtggcagagacgaaccctgtttgccactgttgcttgtgatgactagtgttagtcatcaacttgacaggatctagagtcctaaacctctggggctcgtcgatgggggatcagcttaattaggacagttgatgtgggaaggccagtctcaactgtgaacagtactgttctctaggcagggaatcctgaacggaataaatctgaagaagcaagctgagcttagcattcatcactctctgccccttggccagctcctgctgctgtggtagattgaactgtgtgccaaaagaaaccctttctcccttaagctgcatctgttgaggtattcatcacagcaatggaaaaggagagaagatgttatttaggtcagacatgccctttcagacgactagcagaaagctgtctgctacttaccacttgccatttctgtgtttcatagcgctcaggctgagcttttaaagatttcaccttgtcatggcaataccatagaccatctttgtctgattcctgaaggcagggaagggagagtttttggtgttttttttttttttttttttttacaaacctctttaggtcattctgatgttcaatttgaattaagagccacttttgttgctgagattaaaagttttttgttagccaaaatctactcagactatctcaactgaagggatttaccatagggaagcaggagaatcgcagtcccgtggattagatttggaggctttcgtaagagaccagagctggactttctagcagcggccagggtggcctcttcacctcaagaccacatggcatcaaatagccacttgattctgtatctactttcttgttttcttcctatctgctggccaaagcacatagatacatcccaaggacccaagttcatctgttcttccttccatttcccagcctgggtcaattagcgtggacccatctaaattcctcggaggatcttattgccctagcctgggttatatgtctatcttttatcagctcagataatgtggtgtgaactggcttccaaacccccaagcccatcccctgaatgtgtggattcatactagaagctgtgtaggtatctcacagtgtgtcatactgctgttttgtcttgtttgttttgttttgttgagacaggatctcacataacccaggctaacttcaaactcactatgttggaggatggccttgaactcatgatcttttttccacctcctgagtgctttacactacctcctgagttcattacaagcatgaaccaccatacccagctcaaaatgtgtcttcatacttaaccatagcttccatcctacccccaaaaccatattaaataacgatttctatttctgccttattgatgatgacatgactgtgtgccacaatctcatcatattagaaagattttcttgcagatgttgctccaagaatctttcctctttctatgccttcttctcccttttatgaatatgattgtgacactgtctatatgtgaaagtcagagttttgggaagtctgctcctcctaaatagtaaagttgaagagtagagagtagcatggaaatactgtctacactgcgtgcaccttgaatcacctccgtagagcatgctaaagggcactgagctcatttactgtggagatgctgagacagaactttataaagctcttctacacagaaggctgctgaaagattcaaaaggaaggaaggaagggagggagggagggagggtgagagagagagagagagagagagagagagagagagagagagagagagagaagaaataccaggctggcaagatgctcagcaaataagcaagcaaagacccttgccaccaagaatgctaacccgagtttgatccctctatctacaaggtagatggaggtagctaactgtgagttgtcatacacatacatacacacacacacacacacacacacacacaaatacatgtattttgtttttaatgttgccaggagcttggcacatagctattgtgctggctagttttatgtcaacttcatataagctaaagtcacctgtaatctgttaagaaaaatgcctccataacatttggctataggcaaacctgtagggcattttcttaattagtgattgatgagaaaggaccagcccattgtgggtgatgctatccctgagctggtggtcccgggttctataagaaagcagactgagcaagccttggggagcaagctactaagcagcacccctccatggcctctgcatcagctcctggctctaggttcctccttcctttcctccccaagttactttagttatggtggtctctcacagcaatatcaaccctaagatagctagtagtcagtacaacctaaatgatagtgtttactaagcatttcttttaccagaaatgactgggttcagactgatggaataagtgtccaggaatagtacacaacggtttcccattctctcctattctatctagcctctatcttccatatatgggatgaccaaaggagttcatgaaacttggctctctaagagctcagatttggcagaggaagcagccattattaggccaacatggacacatagatttggaggatagagtccacctgctccgtctcatctgtatagggtagagaggggaaagaggattctatgagtcaatcacattctggttttgctgacacccaccccttcatggaagatgggaagcagagactttcatgtagaggaggtgattcgccattgagatgatctgagaaggcaaagttaaggtaaggcagtggtcattgatgtattagaagcaaagatgaatctaaggagaaaagaagaaaagaaagaaaatgaagggggctggatttcagtaaatcgcaatgcacaacaacaacaaaaaataaatcatggagcaataaataacgtgataggagaagttaaagctacaggtgaccgttggtaaatggtgccacatccaagaagattcaccaggaaacagcacagatgtcatccttagagtaactggcaaattcttagaacttgtctttgagtattaatgcaggaagtcttcctatgttttgcatatacctaaaaacctagaaactcaggttgaaagaacagtagacccaatccttaagtaatgtttgaaagtaatttataaatagtgataaaattgggtgccagatgcaatggagtttcctgcctagtataggtgggggaagggctgcagccaggttttcagtgctctgcccctttctgctgcgcttccttcgcttctgcctgctggctcagcccgctggtttggttctcagctgctactttagccacgtggcagccaacctgcttctcaggacctcagaaagcacaagcgccttctctgggctctccaagagaactcccctgcccccgtggcacgaagacaagggtgggggtcggtgatagcagttctcataaggaggggtcctctgtcagaagtgtggaagggacacctgtcaagtggaaagaacacaagtctcatagtagcacagaggcgcttttacatcccgtggcgactgagatacattcactaatgaaaaagcactagcagagacagaagggccgcttggtcaggccttgtcctccacctggaacttaccaattcagctagactccccggctcgaaaaccccagagacccttctgcctgtgctgcctgggcaccaggattacagatgcgcgcgataccatgcctggctttttctgtgagctctaggcattgaactctgctcctcatgcttgcactcgctgacagtcatctctccagtcccccattttttgatgcctataatgcattattatggtcaccctgtgcaatctgtcattacccacacaatacaacatacccaaagttcaaaggcaagttattcgtcctgtttaattgaagatctggacccctgactctcattccccgcctgccctccctccctgcctcagcacagataaccaccattccattcttggcctctaagctccacgaatgaatgtgaacatgccaaaactgtttctctatacttggcctatttaacatgccatttgccagctctgcacattttctgacaaagacaaattcccttgtttctttctttttttttttttttaaattcaaacccaatttaactgtactctacatcttagtctataacttgcacatttcaagaggtaaaggacagtaagggaaaattatgaaacaatatccagttgataaacagcagccttgtctttttgagatacgtttgatattagagatctaattcagtagctcctcaagcctcgagaaaggggtttggcaaagattctgcgtctgtctttgggtatgtttggagactagagcagactctaaaaacattagcattctgcttattattcatttatacctcatctctatccaaaacatacttacaatggcttcagctttgacatggtaatctcacacatgacatttaaaagccgcagagacagaaaacctctcccttggtaccctgaagcacagcttcatttaatatggtttcctaagctaaatatagtcaggaaggcactgtctttttaaaaaagttttgtattgttttaaaacaaaacaaaacaaaacaaaacaaaacaaaacaaaacaaaacaccctattcttctattcctgtgcatggcaactcaacccaagagctacccagtcactaaccagaagccaagaaatcagcttaactcctcgcctcagtggccctgccctgtctactcccctaagcttcccttcttggtaccctcctgccctgccctttgtccacattcatgccctgagcatctctcacctgactggtttgacagttcctctctggaacagctcctaccccattgttccaggaccaagtgtccattctgacctaatgctgggacatccatccttcccttggtgtcttttagttgtctctaggatttaattgaaactcttgagcatgctcactggaccctgagctgcgtctctctgaatggcctctcctttgccttgtttctttatcaccttcctccaaacactgaggccgtttgtattcctcagagtggcgcctatgatccacctgcttgtaatttaccctttcctacctggctagtcctcttgccccgaagcagaccctgtgttcaagactcggtgacacctcctggacaaagctgttttcacaacccaccccctgaagatcagacactctctttctgtgcgtttccctgtttggggcccataaactgttactcacagtgttttctcttcactgggagtgaatgagcataggaacaaagaccacactgtgtggtttctgttgtccttagcttatagcatttcacctgacacatttacaatattctatacatgttcacaaagcccttgtttatatgcatggatgaataatttagtactttttgttagtgacattctttctactcctgtaattgcgaggaactggatcagctcttcccacacagtgactggaggtcctgagcgttgcagaaatctggctgtaaaaagcaggcttatgaacagtggcaggctctcagctattgacgtgacgtcgtcaactccttgtagggtacagaacagttgcttcttccttctttggtctttactgtaatacacagaaagactacataggaatctaggcctgaggatatctgtggattgagaagggacttcagaactttaggaaacctcatccttgtcgtttctctgacctgtgttcctttctggagagtgggtgagataaatgaatcactcagtgtccagcccaggctctgaaaattgacagggcaaggcagaagtgaggaatgctgttaaaatcagcaagtaccgagtgaccattgcagacccacactctgggaggcagagtgaaaagacagtgaagaccttcctgaaacacaagccatagctattactgtcgctgcatctcatacacctcctgtgacaggttctgatggtacagttatttaaatgtataaaatacagcgtaaagctcgggaaattatcttaaagcccgccacagtagcaagtagcaagtagcaaaaatgaagacatatttcagagttaactagggcaatggcctaaatcagagattgcaactggtgactgctgggactaggatcgcaagattttcaagctcaggaaattgttagtaaaaatcaaaagtttctcacttgtggttctttgtgatcttgggtgtaaataggtcgcgcatgactcgatggcctgtggggaaacctacaaaggttccgtatgtgtggattctggataaacacgaggactgtttaactggccgagctcccctacgtgtaatgcgtaagcacacgggcaagcaaaactaggaactgaagaatgcctctgtctcacagtagagatccgagaggtcaacaaacctttctgtaaaggtcctgataaatactagagactgtgtatattagatggtcttcgaagcagttcctctcttctgccattatagcctgccacggactgtgaacagttaagcatggctatgtttctgtgaaatatgaaggctgggaacttgaatctcatgtagtccccacatgtcacaaatatgttttctattgtccttgttcaaattaagaaaaaaatcactaaaaccattcttagctggtgggccatataaaaacaggaggcaagcctcagcacgtagattgcatggacactggatagttgccattgtaaagccttgctcttagtctgtttaaagctagccagtccccacctccaccccaagacctctgcccccgccaaatgagctaggctgttttgtcctgtgtggaagctaagggaattctcttttctctatgttttcccattctgaagaagctgcttgataccctgcatggatgtagaaaagccaaatggttcaccttgtgttttccaaaccctcagagactagtctacatttcagacagcctgggtgatgagtgagccccgtgcttcccacaaggaaccctatcccttaagcatctgtggcccagtcaaatttatgcatggaaaggctaagtgaaatctattaatatcctagctagaaagaaaactataaagttacacatatatgcaagtgtgtgtgtgtattccacagttcaaagtgtagtcagcagaaaaagcttgcacactgttgcgtggggaggaaaccggtgtctttgaaataaaataccctgccattggcatatccaggcttgaagcctgactgcagcttttagcttccaccacgtgtttacattggaaatctctctgtgcacatatagagttagttctcttatgaaatcatgtctctagggaaggataatttaaagccatttccgtttgttatgtctgagctgaactagactattagggcttgttaacgctggataaacttgagccctataactgccttcatctgcagattatagaatctgtccaacaaattgcattctgatgttctcagaatagatggctgagcaagcagggttctctttaattcatattccatcaccacaactgtcttaggaatcatgattctgaccttcatgctcacttggtgtagcagagatgatctgtcagatggccgaaggcaacagtaatggagaccctaaactccatctgcatctgcgctcttctaaggcagagcaggcaacggctggcagcagaaaactgctggcaaagcatctttcttcagcatgtctcccttcccccaagtcttagcataaatcaatgttaggtctactgaaatagcgtgtgtggtctgcacttagaaatttcatttgaaaattatattgtggcaaccatgagacagagggataaactacaataagtttctctcagctggtgtttaaagtgaacagagcagagtgaagatagacagttgccctgatttagtgaaggggaggtggcggctgccctggtatagtcggactccctccattcccatccatcaaacccactgagcacgcttgctctgttgcttaccctgaaggctacagcttattactgctctctgcttcgcataccaagatgatccagaatagaaactgcatcagtctgactttgtttacagaagagcctaccagaagatctggcacggcttcagggaagtcatgggtggggtgacagagcagtggtgttcccaagcagtgtattggcctccagctctagaaaaggattcctaccccatagctctgctaaattcagttttacaataactgagggaaggcgctgtcttaggccttcctttgtgttggtgttctagctggcaatggggtatggagatggattggaccttgctgtagggcaactgtgtggtttaagccaccctgatctagaccagacccaaaggatatcagaaagggaggagagacatgaagtagtggcatttggagtgggaatagcattttaactcatgagggaaagaatctgctacactcaggggacgcaagcagaaacagtagaaacttcagctcctgttcctccctcatccttaggtcttctcttgatcaattcatgagtgcctgaggtgaaccagacagacatggtctctacctccacaaagcatagagtctgaaggaagaataaacatgagtcaaagaacccttgtctctacctcaaaggagatggctgcactgagggaactgagagcttctgcaagaaagtcagacacactttacaggccttggctaaggaagggagtagccattggtgagagcatttcatggaggaaagttgtcatgtatactgtgtgtaagagactgtaagaaagtgacgacatgtggtctgcacacataggccggagtcaggggcagcctacaatggagtttttgtcttcactcgaaagcaaatgaaaactgttgacctgcttcaagcaacaaaagagattaggagatgagattttcttgttggaaagatactgttgtagcatagagaagggattagacaggtaagtgagggagtgccccgggaagcagatgtgagtgtacaggtgagtgatactatttgcaccgaggtgatgtgggtgacgttaaagagacagtagtcatgggcttggattgtatctcaactgtagagcacttgcctagtatattcagggccctttgttccaaactgggggatgggaggactgaggagaagttcaggaagtgaattcataggctgattattgccttagcctcggagatgtctgcagtactttggggatggtatagtgaagagggtaaagaggtctgggcatttgagagtcatttccctgcaggggactactgatccatgagaagagataaagtaaatagcaactgaactcctgacagaattagttaatggaggagccccaggtctctggggcctgtacttaaatagtatataaatactatataaagctcctgtgaggataatacagtgcacacacacacacacacacacacacacacacacacacacacacacactcgtgcattcgtgcatgtgcatgttcctcccctatcaccatttccacaaaacaaactaaataaataaataaataaataaataaataaataaataaataaagctaaagcagtgcagaactttcctgaccatgagattacaaaaagcaatattaggaacatgaactatatcataatctcaaaaaggagaaaaaaagggggggggggagctatggtttttactgcttatggtgttatacgtagatgatgtcctattataagaatttacatatcacttaagtctgagtccagcctggcctgcatagaaagctcctgctttagataaaatggaaaaagaagagactagctcaccacgtgtgcttctggctcttaaacaaggattctggtaaaatgaactttttttttttagatgtaagtaattacatttaaagatgtaagtaattttattatatgtaagtacactgtagctgtcttcagacactccagaagagggcatcagatcttgttatggatggttgtgagccaccatgtggttgctgggatttgaactcaggaccttcggaagagcagtcggtgctcttagcctctgagccatctctccagcccctaaatgaactcttgtgactaagatgggaccacaatgggcttagtgaagagcttgttgtctgtgttttccctccttcctcccctttcaggtacccctgcccctgtcctttcttccctctcccttctcccttgtcctctatctcctgtctttgtctcttattctctgccctttgtccctctggggcaaataaatctcctttgtgctgagaacttagtcttcgggatccttagccaataccaatgtctcacacagaagacctaagtcagacccatgtagactcccttgttggcagttccatctttgtgaacacctatgaacttctgtaggttttcttgtggtgtccttgacccctctggctccaataccaccaccccccccatattctataggattccccaagctccgtctaatgttgggtgtgggtctctgcatctgtttccatcagttgctgactgaagtctctctgatgacaactgggcaaatgtgatttttatattcctgaattagttacatttctcattgctatgacaaagtatctgaccaaaagcaacttaagagaggaagaaattatttgggacttttcattaggggtccagtccatcataaaacaaaactcatggcagtaggaatgactcatgactgtgtcagcaggagcattagactgcaggctcatgacttagtgggccaggaagcagacagaaagagaccagggttggaagtagagctcaccataacacagcccaactcccagtgacctacttcctccagcaaagactgatatcctaaaggttccataacttacaaaagcagcatccccatcagggaccaagtgctcaaagacaaagtaagtctctaagggggtttcatatccaaaccgtaactttccacctctggccccatacactctggcccgtggctatctatctcataatgcaaaatggattcagtctaaccacaaagatctccaacatctttcagtagcaacactatttaaatgtgtgaagtctcttctgagactggagaccatctcttaactgaactcctgtttatttccaacatgaaatgatacagagtaaaataaacctccccatttcaaaggaaggaattcgggcatagcaagggaagagctgaccaaagcaagattcagcagggaaaacattaaatctttcagttccatgcccagtgtctagtgctcatagtggattcctctggccttcaacaggcctgggtagcaccgctcctacagtgtctgaagtacactttacctctcttcggctgcttcctcagggtatctatagctttcctaagaggacattgcacttctcggcatcttcagtgttgtggggtgccttcactgccacttgagcttcacctgcacagcccactcaggggatccacacagtgaacccaaccctgcctggcttcagaagctatctggaacctccttggcataaacctgcacaagctgtaacccttttgtgttgtatttcttcaaatccagaacttggtagatatagtcgtctggccccattcaccacaggtacagcaacatccatgtacccgggaggctggacctgggagagaattagtttgagcagccttcgttgaagcagcttattgctaatgtgtcactgtgttcagacacctttctctcacttgtcggtgatctcattttaaataaaggtttttcaattatatttgtattgtggacaccctggaccttctggtgagtggagtcttctggggttctgcactcatggcaccattccagtagttccagagcatagagtatagtttatgtccctcctcttcctcctcctcctcctcctcctcctcctcctccactgtgtgtgtgtgtctctctctcttgtttttgtttttgttttgttgaagtgtctgtggcggcctgtgctgtgtgagtgcacatgcacgcccagagcagcagacagcgcctgctgttgttcctctgggacagtctgccttgactcttggtttgctttgctttattttgacagggggtctctctctggcctagagctcatcaagtgacttagactggctggccagttagctccggggatctacctgtttctgcgtcttcagggtggggatttataagagtgtgccatcaggtctggctttgcttttttaaatgaggattctgaggaagaaaattgtgccttttacctgcaagccaaacacttcagtggtggccccaggcccctttaggtttcttctttattgcagttttctcttaaatgactttaggagctcttcccacacctgccctacctgcggttttaactgagttcagtcttttcctcaccaaaccacacattgatctcaacttggtctctgcttcttgctttgtattcttactgtaaacccgacttaaagatgggaactgtagccatgccatagccacaatgtggcaccatattaaaatgtctcctaccaaacaagttactccattacgtgtgagtccagctttattcacattttcagaacttatgtagaatggagtaagtctgtgtcccctgaaggtggatgggcatccttcactgcccccagggctgtctgcagtgtgcttttctgcactcccaccagaatcaccctttaagctccgattacaacatgctagcactcgactggaccacagttccaaactcttcacttccaaaagccaagcctacggactgcttggttagcccccacttcccacttctctcttccaatagactgcatcagcttccctctgccccccccccccatcattatgaccaaatacctgacagaagacagccaaagtgatgaagactgttttctgactcatggtttgaggggacaatatatcatggtagagaagacatagttatgagagtaacttgtgattggtggcaggagcttgaggctgctgtgttcatctcagtgggctataaatcagagaggagagggggtgagggaaggagggaggattggagggaggaacagaagggcaagggggagtgactacagctgaaattaggactagggtagcccataaggccctctcccagtgacccacttctagcaagacccaataccctacagctcccaaaacagtgcccaggactgagtttgtgagggcatgtcacgctcaaaccgttacaatcctgttttctgtagtgcccatttgacatgtctttttattctcttaatgctttctttgttttatatttaacaaagatgaatgcaaatttatcaagtgcctggttagcttcagtatcttcaaagtagcttgaacattttaaaattcttcttaatattgtctaaaacccagcttttttttttttcccaaaacagctgaaaccctcattgtgttactagttttgatgtgaatctggaaacacgaggaagtggagtggtgcctgggctgtaggtctattcgattctctagtttaatccactcctctgtctcctgggcattctatccaccctctcctctttcccaacattgatgcattctctgcactcagttgcctgcgattgacatcctggttctcctcagagtcagacgggtttgctgttgagatcattctgggagtttcagggggttggtttgtttgttgatttttgttttttttaaaatcccagtgaaaatagacccattgttattgttttctagtttaaaaaaatggggaaggggaagaatgtgatcaaaatatatttaaagttaaaattgtcataactaataaaataatgataataataaaattttaatagttgttaagtactgaaaaaaaaaacccgaaatgtataaatggaaaaagtcaactagggtcattctcctgagagagttaagtttggtgagcccctctttggggatctgtgcagggtccgttcacatgtgccaccgtcagaaaacaaagtcatactgaactggcagtgtgtggccttttttactgtgcaagtctgctgtaggcaagcttatatacactaaatttttgtaatggccgttcttttgtattcagatttctatacttgtctaactgtgtgtttagaatgtatccctaaatagcctcaacggcttctgtacattttcccatgttcacgtgtcaaactgcctatcggcagcatgttatttgaatgatgatcaagagtgcctgtgagttcttggtcatgcacactgtgctgcactgtggattcttgatcatatgcactattgctggactgtggattcttgatcatgcgcactgttgctggactggtaattgtttctcaacctctgtgacttttacaagtgaaagcaatgtctactggctcacgtcttcctatttgctttctttgattgattaatggagggaatgtatgtctttttaaaaatatatattgtcctttcttgtttcttttgcggtggcttgcttgtttggacctgtctgaacactctgagggggttatggtctgcttggtctatggaatgcagggcctgggctataaattattcttcagttagattatgtgatatgccaacctatgataaaaaaaaaagtattgaaagtcatgagaaagtaattttaagaatttcattttatgattacgtattccacggagctggagtgtccttacaaacgaagaacttaataatacctgttaaagatgtaccaatcctagtcaggatgggtctcagctggacccttgtgttatagtccaaacaagtattatagaaatgcaaaaaacccctccccaagtctgccctgccaggggaggaggctatgctgtggtacctaccccacctgcctgcagctgcctctccaggttttatgatgcgtctaagatgaaatttttactgccttctccttccatctcccccaaaaccacagggggaagaaagaaaaaacagaccccatcgagaggacgggcagaattgtccgaggtggggaactggctactccagaaggcagcagaggcggaaatacaaaagacataaagcacacctcgctttaatcccttccgtctgcccaaagcgcccagagagctcataaagtctccctttctgggtgattggattcctttagcttggggcaggcagggttttgttgttgaagaagagggctcggggagctggggcgaggagaaaggccattgctggggtatgaaatctcctctcctagttcaaggtactgaactgtaaatacaagcagctgtggagggaggggcccaagcaggcacacaggctcaggcaggcacctcctgtcagcctagagatgtgagggttcacctctgcatccccttggcagaatcaagggaccattttgaatgttgctggcaaaaatgagtgtcgtgggtggtgtgttttctctctgaaaaagtggttgttctgtgccagtgtttagaagtgggggttgttggttctttttttgtctgaaataaagacttgagagaccagttctttcagacagtggaaaaagggaaaaggagggggacaaaaatctcctccagtctgctttcggtgtgggtcttttttggcgtgtttgcttttgacctttctacagtgtttgctggggtgggggaactggatctgctccatctgggctgagctcctgggtccccaacaacaaacacttaagcaaaacaatttacttggcggcttcaagaagaatctcctgaagtgtgcctagtctctgccgcctttgtactgctggcgaaggcagacagcttgttcttcctccaactctgcccagcagctctgtcagtgatcttgccaatctccctcctggtcccttcccacttgactcctgaaagacccttcccacctcctttggaatccattctcaccatcatatttggttgttttgaatgcatagtannnnnnnnnnnnnnnnnnnnnnnnnnnnnnnnnnnnnnnnnnnnnnnnnnnnnnnnnnnnnnnnnnnnnnnnnnngaatgcatagtatcctcagagaagacacagtatcatgatttctgtttctctctttcattggctggagtcctggaaagtagagccaacaatggggcatccagcctgaaggggcagcggcagtcatgatggcgccattgactatttttctacctgttggccacgaggctctgttcttgtaagcagtgtctacagccttcccaccaactccattgtcataggtggcatctccatttacagatgaagtcgaagcttaaatgtttgaaattgagctcacataacttcagaagcgtctagaccaaagttgacacccagagtttactcgtgtccacttcagaacctcttattagatacttgaggcagacatactaaatgatgaactgaaataggctttgcacctgagggaactttgccaggaatttgaagaggtaccatcttacacttggaccagtagagttttggtctctagagcttcagtcccttttcttcagtgccttctctctctctctctctctctctctctctctctccctccctctctctctctctctctctctctctctctctctctcacacacacacacacacacacacacacacacacacacacacacacagcatactcatcctcaggagcaggggtagggttgggaagagagtttatgttttgccttctctccttgatcaggctcttgttctttcacagcttttagagttaatgccaaagacattccgctaaagccagaataaagcatctgcttctgcaagtctacagtaaccacacgtcagccatattatagcccttagactgacagagcgctcctaagacgataactacaaagggtgcccagtggaatatgtaaaaacaaaacaaacaaacagaaatgttagcttttatcatgtttactaatcctcgactagaagacaaaaatccctagataagaattagtcaatagaactatattgatatcagcaattaatcacaatgactaatatctgcttctatttgccaaacatcattgcaaggatttttcatatatcagctcatttaaattagctttctttttttctttgtaaaatatgcttttattgttttatatttttttttgtgaactttatatatgaactatctattatcacatcacttctccacacccccagtcatttccacagcaacctgttccaggtaagggaatggagatgcacagagtaagtgcaggagattaggttgtgttgctggcatccatgtttctcagttacacttgaagagcgtgatggaaatggaacatatccctggtatgtgttttcagggagtgagtgtacataagtgtacgccagtggtgttttgtactgtcccggacactgctcaggggatgacagacagacaggaatttatgttcttataagcaactctaaatgggaaagcccttttgcaccaaactcaacttctctcaagctggcatttcccagttagcataaagcctgcatctccatggttgatcctgttcctaaaaggaacaactaacttagtgctcccgttgctctcctccctgcagaacaccatgtttccatgtttgatagcgaccaaaacaaactctacaaacaaacccaattcttcaaactcttaattcttaggaaactgatactgtgcatagagaaaatgtttgatgagataatacaaacaattcagtagttgagaaaaatgataaagttgtacaatatgtgtgtccacagaaattgcatgcatataagactccacctataaaacacatatgtgttattatatataaaattatatttttgtttctttgcatggtctggattaagcccagaatagaaacagaaggatcttcaggtgtcagcctgcttaccctccttgattgtgcacgctctgcttttccctagtttggtccttcacctcgtgactgatatcacccaggagggccgggactggtgtcacccctgaaagtaggatactctcctgtgagagagtcctgaagtcaagacttgtgtgcacatgggccatggtgtctacgtgccctggtgtgaactgggaatctcgggcatggccctgcttcacagacacacagggaaacaaacacaaatgggatggtagttagaacccatgacaaagactagtccatgggaaggcacaggtctgactgggtcatgtgcttacctctccaaatgcattccaagggcaagcaaggccacaatggactgccttcgctagctgcgcactctgtgctgcggagctaatggctgatgaatatttagctttgctttactgacatcctttcttgtctgtctttatcctctctatctccccatccccatcttcttggtccctgaattgcccttgtttatagatcgcctacctgatccccaatcaaccctctcaccctctcgcattgctcacaactgctctgcctggccttagaagagcctatgcttggggctggtgagatggctcagtgggtaagagcacccgactgctcttccgaaggtcaggagttcaaatcccagcaaccatatggtggctcacaaccatccgatcacgagatctgactccctcttctggagtgtctgaagacaactacatagtgtacttacatataataaataaataaatctttaaaaaaaaaaaaaaaaaaaaagaagagcctatgcttgattcagggcatgcatgaaacagagtgcctgacacaggcaaccaccagacattttgtggggaggaccaattagaggccagagtgaccagggcgagcagcaggacgtccagaaggacgcctagctgctaaggagtggagcctaatctcgttacaggcgggatggagactcctggggcccacaagcttcctccccgctgtgcctagagggatatcattggaggaccgggctgtggagggctctgctggccagcagcccccttccccccaccctccagccccctagattctcttttcttttgcagtgacacacactgagtgcctctgaggtcatttgtttcccacagcctcacagggcgctgtggcaacaagggggacaatggtctctcacagggatgatgggaggccttgttttgccttaaataagccccttcaagggagcagcaaggtctggtgtgtgtgtggtttgttttttcagaaaatcctcttgcccatagttccagtgtgaagtactcaggcaacttcaattgaggacataaagaatcctatgtgtgtgagagagggtttaattttatttttattgccactttgagaccagaactgtgtttcccttctctgagttaccctctctgcactcctgctccctggaccccagcattcttcagatagttatatgcaggaattggcaggtgctggggacagtgcatctatgatgtctcctgggtctccagttgccctcttctttggtgagggagctcggcggtggggatttagaaatgcgttcctttgcattttttcacctagtcccaagtctgaagaaagtgcttaaaagggcctatgaggggagggggtgggattcctggcaaagggaatgtgaaaactgaagagaggaaggcaagccctgtatgctgcctcagaacacaccagagcttctggggagtgcccaggaaggaggcctgtgtaggagacagagaagttgggctcaggtcctgatccagctgtgtgttaaggaaagatgcccacactctgatagccctactcaggaagaaagagctgtccatccatcttagggtattctgtccagtgtttcagaccttctcatggagcatagtgtggctgtggaacctgcacaggtgagtgcagggcatgctatgccatcttggtactgctgaaagaactcagtggggaaacccccactcagctcccaattcggcgtgcacccaagaatcacgaatagaacacaacaccttgatgtaacaacaagaggttttttaatggcggagctccgggtcgaaacgtatctcacataacaggagacagtggattcgaccacgaggcttggaagctaggggtttttatagaaaaggagtggggctgggggaggaattggcgcggtttcacatgattggtccatttaaacatcagcagcctgtaacatttaacttaggtcagaggggtgggagatagggaggcgatgggcttgcccgggcatgtcctggtctgttctgctatgttctcagccccaggtttcaaggctcagaaacaactctttgggctatttaacatacattacatgaattacagttttatttcctttcactgcgtctgcagaaactgagcctgaacagattgaagtcattcccaagactgcccaaggtgagcagctgatgggtcgacttcagattacacccagaatcccttgctctctggacccttagctaactagtgtggtctagaaattcttggttcttcttttttaagacaggcaattgagacagggtctgatctgagccatcactagcacgcgtcaagttgcttcttgtttaactgtgtgggtaagttatgtcttaccacaaaccgttcttctttgatttctaacaatcatattcccatggataaaatgttatcgctttactataccaagctcaaaaacttttggctttctgatcaggatactaggaaataatattttttttatttgcctcttaattttctgatttttttcagtaacattttgaatatttgtgaaatacccaggaaggagattttaccagatgtgtctattgattacactcttataaacatatagcaactccaaggctgatatcattttgtggtaaatttaaaaaaaatatccagttattcttgagtttaataaacatctctaaaattaattcttaacttctatatcactttaattcttcacagtttctgaagtgggagtcctggaagttttgacaattggattgacatatgttttctctctctgcaacatcagtttactttttattttattatctattttttaattttatgttcattgatcttttgtatgtttgtgtaagggtgtcaggttccctgaagctgaagttacagataattgtgagctgccaggtagggaattgaagccaggtcctctggaagaacaaccagtgctctaatacattgagccacctctccagtccctccaccatcagtttaatgcttattctaaattgaaataaaattcattaacttcaagtaatagacatcctatgtcaatctttctgacagtgagaggacattggacagactgtcgtcctatttctggccatggtggaagcaaaaggatagactgatttgagctaaaaaaaaaaaaaaaaacaaaaaacaaaaaaaaaaaaaacaacaaaaaaccacttaaacaaataaataaaaatcaacaaaataataaggtctgtgacaaatgatagatggtgaaagaaagcccctaacctctagtcagttttgggaatgtctgactttaaggaagtacagactgtgcataatttgccttgtgactctggactcaaggagccttcctttgtggatcagcacacccctacatccccacaccctcacacccccacaccccccacacccccacgggtcttttgcctattggcacatcctacccacagcttccatatatacaaaagtttcatcaaatccaaaatggtcaccaagaatgctgaactgcaaggaaatggcatcgagagctgataaataaataacaggcctgttgtcccacaccccagtttaatgctctcaagaggttcttatgttgctcgaattagtgggcatgtaaatgaaacccctgttggccttggcagatactggcctcttccttgaccttgtttgactgaaacaaaaagtcattggtagaacaaaaattcagagctctgaacttggttgaaagaaaagggcaattctctgaattgggtaattggatcactctcccaagtgccctccggcttatatcaaacatataagaaggggattaataacttcagtgtgtaagcgagcttcagctagcttctaactctagcgtttcagtctcaggagctttgggacactaacagattctcttcagagcatttgaagtgccctttataaaatgtaggaatggtctagactgcaggctactgtggaatccttgtcattgtggattgtcctactagacaggcaggcaacctgaaagcccttgcaaaatggccacttaatgaagctcaccactgaattaccgggcttttcaaaccaatggcagtaatagtgttcctccagattgtgcttgatagccacttccccactcatgactttataatccaaactaaattaaatgtgtctgtaaaatgaaaaggtcaccatagtcctatttcttacacaaaagtttggggattactacagacccataacctgaagggtaaattgtaaggagtcacctgaaaagcagggaactttttattaatatattttaattagctcatgttctcagtcagtactgaatccatgcttcagggatagacttagtagagagggaagcaaaggtcactaaaagctatcagcaaagcaggttcctgaaggttggggggacgcacgggaagggcccctttgcttcttgggaacatgcaagtgcaaagagaaccaaaggagatggctcatgagtttatgaggcaggaaagcagagaacattccaagtagaaggcacagcactcaagggaaatatttttttaaagacacattggagattaatctggcccagatagaaaattgcaagctgaagttgctatttttgtcatagaggctgttctactaggtcctctggcatggggttaccagtggtagagatactttggaaactaaaggaggtgaggaacatttatgaaacctctataggtatgggcgtcttctggagatcacgcaggagagctcttttttaaaaaagattcatttatttattttatgtatgtgagtacactgtagctgtacagatggttgtgagccctcatgtggttgttgggaattgaatttaggacctctgctcactctggtcaaccccattcactcctgtcaaccctgctcactccacccctgcttgctctggcccaaagacttatttattattataaataagtacattgaagctgtcttcagacttaccagaagagagtgtcagatctcattacaggtagttgtgagccaccatgtggttgctgggattcgaactcaggaccttcggaaaagcagtcagtgttcttacccactgagccatctcaccagcccgagaggccagagagctcttaaggaatattctagaaccgattcttaatgactgtacatcagttcaaagtccaaaaagagttagcagaaccttattatttcttcatttattgctgacttagtttcaaggtagagtctttttttattcctgatgaaatgtttctaaacctggatggatgtattagtcagggttctcgtaagagaactgatggggtgaatctgtatagatagagaaagggggtttattagcatgacttacaggctgtggtccagctagtccaataatggatatctaccaatggaagatccaagaatccagtagttgcttggtccaggaagtaaattggatgtctcagctggtcttttagtttatgctagaatcctgaagaagtaggctcgaatgccagtgaaggaattgacttggcagcaagaacaaacaggcaaagagagacaagcttccttttcccatgtcctttgtataggcggccagcagaaggtatgacttagataaaggtggattttcctacctccaaagatctggattaaatgtgggtcctcctgttttaaattatttaattgaggaaagtctctcacagctatgtccagccacttagggttaattccagatgtagtcaagttgacaaccaagaatagccatcacggtagagttgcttctatgaattaggaagccagaaaactaatctgaaaaataattaactttaattatgagctgagccaagtacgtattttcttcttgtcttccttccttccttccttccttccttcctttctttctttttctttttttttcagaaaatacatgttttgcccatattgtaacaaagtttcaaaaaagttaagtaacttgccagagtaaaggcagaccgttttatttctattttttatttagcaatggtttctagccagagatgacaaaaatatttcaccatgctagataatgtgtttggaccactatgttgaaattttgctgcagctgcctccacatgatcctgtgtaaggtggtagtggtgtgtgacctgcatgtctctcatcaaagagacgaccttcgaatctttactttctcctgaaagtggaagatgagaaaagtcatctgaatgctatctagctgcaggaaagctatgcctactgccaagatggaaaacactctgttgttgcatgaacaatataggccagtaaatttatgagaactattttcgaagacttgaaatggaagataagtgtaaataaagtaggtttgtagctcaaatgtgtatttttttagttgaattagtttatttttctgatttgtaattctttaatgtgattacagaagattgaattgtatctatggtgatatcataacacacccctagccctctgatgacttccttattgaaagattaccatgctaaggcagaataaggaaccaaaacacacaagcacacttgactctatatttaaattgttatctatgctacagcatcagaatgaaagctgtgaagtagcctatggtacatgaccaaaggagccaagaaaggtcatgaacttctagctcagactcatacctgtagtttgagaaataatctcttgtattgttttgcattttagaaaattctatgttttcttgtgcatatgtgtctacatgctattttatatttaaagttaatattttataacacaggtgtacatgcatgcatggtatgtacatgtttgtgcacacatactcattttacctggaaaaatgggtaacccttacttaggtattctgaacttttggggggggggggtcgagacagggtttctctgtgtagccctggctgtcctggaactcagtttgtagaccaggctggcctcgaactcagaaatccgcctgcctctgcctcccaagtgctgggattaaaggtgtgtgccaccaccacccggcctgaacacctttttagccatgtaaaaatcaactattttggtgaattgcagttagataaaattttattatagcagtccaattaatgcttatttgtttctgaaggataaataaacgtgatatggcttttatattttagtatattaaaatttctcaatagctcattgcctttatgctagtgacaactggtcttcaaatctctctagtctccctataataaactgagcataaggagaaaatcaagctaaaattttgctttactttcacttccactcagctctctccaagcacacagtgctgcttcctacatcagagatgcctaggagctggcaggagacagctcagctcttcctataattcctcatggcaaatgtgtatcttaaatgtgatgatagattccagtttgctttggtgccttattttgagaatagctgctagagccacaatctctttgctttggctgatgctcctcctcctcctcctcctcctcctcctcctcctcctcctcctcctcctcctcctccctctcctcttccccctccccctcttctcctgggctattgtatttttcttctctgtatggagtgaaatggaaactactctctctctctctctctctctctctctctctctctctctctctctctctctctctttcacacccccgcacacacataattagtcttggctatgatgtcccttggctaggcagtttagtcagtacccaactcttctctacagctagtgctttgcttgtcctgaagagcccgatgattcatctctctggggagatgagacatggttccatatttgatattacccattgggcttattgctttgcttaaattcccagatttgtctagtgtttgctgactttttaatccaagaataaagtcatgtaagtcaccagtgtagtgctagtggatttggcaacttataaagtttagaaagcctccatcccatcaggatggaggctttagcactgcctcagccagggtgcaatgccctttccagtgcacattcttgcacagattgggtccactgaattatggaaatccaaactctccctttagcagccaagagcactccagaggcacttttgatgatcctcaatgtgggcacttttgtgccacctcaggttctttcttcactgcaccattggctttttcttgggtgagatgggaaggagtggttccgcctttctcaggggttacttgttagctacttggctttgaatttgggtataagttagttggtgaaattcctcccaaaaaatcctgctgttctttaaaatgggtgctgtgtccttcacatcccctgctaagacatagtatgccgtttctggcagctaggttacatccagaacctctggagtttaggtgatagatgtagtagtcaaaatgactagcttgtgcaagctgcagacttagagactggcctggtcatctctctggatcacacagaagtcacttctgaacaacaaccaaaaaaaaaaaaaaaagtactatatacaataaaataatctttattcctttttgctgcaaaagcaaactttgagaggatgattctctcacaggatatggaaatggccttggagatggtccagggctagtggcacagctgctatttcctgcaaaggacatctatatccagaaggggaaaggacaaagttaaatatatagcaggaaaatgatgcctgaacatattaacaagaatggaaggatttgcctgtatcacaatatgtccataaagataaatagccattggtaggagttacagttttcatgtttggaagaaatatttaaaactctccatcaaagagtaactgatcaaccaccaacaatagcaatgacaacacaattcactgttggccccttttaattttaaaccttttttggagatctagttttacatttataatagttttggtatggcttagaagttgttttttaagaagctcaggcctgtagaactggagctggggtatgtaaagccaggagaagacttgggattttatactaaacatgataccaatttttcaaatggagagagacatgactttatttacacctttagaaacttgcatagacttgactgggtcctaaagcagatggaggctgagaaataaaccaggaaatatagcaccagtgggtggctttggaggaggtgttgaggggatgagactggtccaaacttcctctctttcagctgtgaaagagctcttgactctcccatctgcatgtactacagacccaacagaaagggtgaaggaggaagaacagtgttactggagaacttcccagaacatatttggattccacctaaatgctatttgtttgctagtgttaattaggattctggtattttaagatccctgctttatatttgggaaatagaaaacacagggttgtgggtaattaaggagaaatagtggcattaaggtcactaatgtttttcttcaggagtcaccaaaagaatggaattccaaatgctagactttcatctcccttgaaagcattgacatggctttttgatgaccctttcactgttccttaacagaaattccaccacgatgctctttatggagttatgatatctctttgtatctctgtgaatctgacaagtaaattaagaaaaatacaagtactattaagagctaagccaaaccagcaactttaagacagtgttctgctgcccccattgtttgttaatgagccaggcagctgctggtcctcctgattatcctagacaggttgtattcctctttcttagatatagaggaattttaatccagcaacaatcctgctctggcaaaggatcacatccagagaccttctacgtctgttgatctggctggaatacacacctttcatccctctggctagaatttgacatctaattgagggacagacaaagtgacaactcagagaaagatttgtcagaatgagccagagataggatacgcctaactcttaagagaacagataggaaagagactacttaagagcagtgcagagagagaatacagttgagttcagctgagttagtgccgtccagttcagtgcagttcagttcatggaattcagaggcatttttaccaagcagagcaattcagtcagaaaccaagagaagtcagtttgagtcagtcagcttgtagagttgtttgagccagaacagcttgtagagttgtttgagccagaacagctgagttgagccagccagaaaggagttcagaaagagctagaaagagtaagtttatttagcagtaagtcttggaggctgaaaacagtctaggcctaggttaagagacagaggctggaaactgaagccttcgagatccaggcttgtaggagatttgttgtacaaaggctagatgcttctaggtctagggatagttagatagaaactctctgagctcagcacaagccacgtattcacacagcttgggtatggctctcctcatcccttcctctgaggaaataaaagcaacatttgtatttaattctcacatctgtgatttcacagatgaggacacaaaggcccagagatgtttaagtaatctactcaaagcctcacataagtgtcaagcttttgactctgtggtccccaaactacagctcttcttaccacactgcctattgtaggggaaaagttggttgtggcttggttatttgcatttgtaaagcatctttcacttgaagaaaagaaactgagaacaccattttgtttttgtttgctgttttccttgcgtgtctcttgcagagaggaaggaaagaatcaactcttactggctaacttatatgtgtcagaagttcattattccatacaacattggacaacattatacagataaggaaacaaagttgtccaatgtcacatgacacacaaaggaataaatctcaaccttggtgccgctcctcagcaaaccctgggctccattagagcagagaagtctgtttccccctcaggccattttgttttgttctataccagtaagctaaatcccagattccaagcagtctgttttcagactatcatatctctcgtgcctacagcagggtctgactctggtgcatacgagatgctcaggaggaaacgttgaatgactagtgagtgcacatgctctgaagtgcaattaaaatgtgtggagccttgaaccgtacttcctagtgtgttccagtgtctgttgagatggtaccatggaaagggtctgagagagttcattcttgaaaaaaaaatgtgcattcctgatttgcaaaagtctactatactcaaagctgtgcagtttaaggaatgggattgctctcctgttgtctgggaaactgagacacagaaaggctttgcaagtcagtgaatgttttgtgacacaaccagaattgtgagagtctcacctttatagccttagaccacttagcaaccctgtggtcttggtagggctgcagctttccataaatctggcacttaatcatttaaagagatggcaatttatcttaaatatgtgcctcattatggatgcgacacacttagcacagatggtctcagcagtttttcctggcttcccttaccccaacatatctagtacgctaatgtcaatattagctttactgttttaggtaactttggtgtgcttctcattagctgcaaccataaagagttgagttttacctgcgctgagggatcactaaattcctgctggcatctgtgcacacagccccatgtcacgagtgaggtcatgtttctcctggattgtgcctgtatctgatgagcctaggctggcatgaatccgagacaatgaaataatcacacccattagctcaccagggccttattaagatgtggcctggctttccatccattcctccttcttggaaaaactgacatagtcatagtgtgtaaaggttagtggagatgaagctgctttagcaaccaagagctagttaatactctgtacttaaaagcccaccgagctgtggctgataacaggaagttgcacttcaagaaacaggattcgagggtcttttccctgcctgtcccccttctttaaaaaaaaaaaaagttttattatgaagcactaaccagcctcaaacttgcacaatgcttcggtctctgtctggagagggctgaaaggcaaatcagaaccctgtctagttcaagggtgttctgtgatctgtgcatgtatgatagtaatactgaatgcccccctgcccacaccctccagtgccccactagagcagtgctttccaaacttccacatttctttgcagaccaccacacacacacacacacacacacacacacacacacacttggaaggtttgagtctggcaaacaaactgtaataattaaacaatggttttgttttctcattgataactcaggtcattgtgcctttatctctctccatagtgctttcgtggggacatcttcccagacctcaggtatagccctggatgtgacccacagttacatgtccagaataccgtccacttcaccacagaagccctttcacagtcccttgtgtgcctgccattataaagactggtctgtctcactcctgactgtttttctactccttgtgtctttgcttggcatatataactggcacttagtaaacatttgtcgaatgacttaaggcattaggtaactgaaacacaagagaattgtgggccttatattggcttggagagtcttaatctataaatctggtagggtttctgaagtgttgacactggcttaagtgaaagtcaccaagttgaaaataaaagattaacgttgggggaggaggttgtgagatgatgcttccaacacattggcaaggttctgattcttaatatagagggatcctggctactcctgaactaaagagacagaaacctgctcatttcatatatatccactgcagagctattggagaaacctacggagttttacaaactgtaagggtattgttattttatggttgttcacctaaaagcctcggtaacacctgttttccctggtcataattttggagatactcgaagccatcctgcctctggttttgtttcatgaacctaccttaacccttaaactacgaagagcacaatattttgttgagcacctactttgtactttgtgttctaggttataagttgaatacctggagtctttcactaagcttcatgggatctttaccagtggatcgatcgcatcatgtaagagaagactagcatcatgtcctagtgtcaggacagtctttcagactttcctgatgacctaatgttctctgttggggacatgctgcagagaagtacaggagattttttttttttttgaaaagccagaacacttgctaatacctcagacagggatgtacgttgtatgatgcactgcacggcgccccagctttcagagaccacctcttaccagaagtttgccaaccccagctcttagagagattcagcccagcagcctcagtcagtcctctcatccgacagtaatcaaaagttgcttggtaaatcagtggggccgaaaacattcttggcagttcaaacagccagcggtaagaacaagctttctttacttgcaatgagttcattatccaagggccagaagtgctcaaaatcattgattggctaattataagtaactcaagggccataatgcttcagtccctctgtgggaatatttataagtgctcaagttcagctcagataaaagagagggatgccacccaagaaaactgcaggaaaaagcctagaattagatggcatgggatgttgccagtctgaaagaggaaggatcaatatatcactgaattttacaaaccaaccttggaaaacagattccctgtgtccttcccagctttaggatgggatgcaaaactaggggctttccccctttactcgcggtagtaagtctaccctgttttcttaggaagggaagcagttgctttaacactctggctagattcccaacatgaacagggtggcccgattaaaacaggcctgtggatgcttctgcgtgagggaaggggttagctgtaaagcaccacgtgcttgtgggtgtttaatgaatatgagctgattaaattggccaccctgaattataacctcatccctctggagctcctctctggctcttagctcaggaccatgttcatcaaactttctgcccaaacttgctaggcagaaatgcttcctcctaaagttgcctgtgttttccacccaacgtttctttgtttcaaagatgcgcagtagaatgtgaccatgggagacccttcccttcggatgcaggcccagctgcagtgacggcagccacacccacagcacttcccctcaaacctgctgcctccatctgtttccccatctctggactagtacaaagccagtgtctgtctgggacagatagtgagctgagtagcagacagaggaggccttgtctaaagaaggaaaaactactgttctagaaaccgggcgacctagctttctggctggattgtgctaagagccatctgtgtggttaggagagtcatttgttccttcacccataaaaggcaaaggcgagacaaaaatcaatatttctcaaattgtgggctctgggacttggggtctgcaagttctatgagatttttaaaatttttatactcttaccaccaaagttttttttaattattattataaagacagtataattacagttgaaagacactgaaaaaaataaataaataataagtttcttaaattggtgattctaaaacttatgtaacattttctggaggtttctcggtatattatgggaatctcaaatagttgtttttttaaaaggactccgtgaatcaatagaattttctataaagcaaaacatcttcgttttaagttttttttttcttccccccacagtacgcttaactctctcaatgcatgggcttcctttgtttttacaatcaagatatttgctccttcgccaaaactttccatgaaactgtaaagagtgtgtttcttacaaaggctgcttttccctttaagatttggagcattgggctgggctgatataactcagtgggaaaagaacttgccacataagcatgaggacctgagttcaaacctctagagcctgtggaaatctggtactgtaacccttgtctgtaatcctggtgctcctgcatggacctgggaaacaagagcatcgctgggaactcatgggccactgagcctggtatttgagacagaggagaacagagaccctgccttaaacaaggaggaagacaaggaaggacggatattcagccctccgcttgtaccataacacacatgcagcctcatatacctaaacacacacacacacacacacagagagagagagagagagagagagagagagagagagagtgtcaaaggtcaaaggctggagatatggatcagtgtttaagaacactggttgctttgctttgctagaggacacaggttcagttcttagtacccacatgatagctaacaaccaattaatattgtatttctgagggatcaaatgccttcttccagcctccttatgtactatatgcacataatgcataaacatacatgcagaaaaaaaaaacacccatgaagatttaaaaagaatcagagcatcataagtcattgttaatcaaccttatcaactgagactacctttcttttatctctcaacccttataaacctaagattaaatttagttgtgcattttaaatcatattttacaaaatgcatttgtgcataccatccatctatctatttattttgtgtgcacatgtgtgggcagggtgcatatatggagctcagaggacaacttataggagttagtcaccgagttctatcatgtgggtcttgggcatcaaacccaggtcctcgggcttggtggcaagagcctctactactgaggcatctcactgcctttatcccttttgattttcagtagacattgtctggtagcatgatgtccattatagaaaggaggataatttcaccataaaaaatcacctggtgtttcctgattcattctctccagcaaagctttcctattcttggaatggcgagagagtagacggggtatctgttagtcgttctactgcgctgatccagggctacttgtttcaggaaatagtaaatggggcttctcattcaaggatagactggcactgccaggtgtcagtcacatgacatcagtttggacttagtctcagcccagttcctggtgtatacaggtactctgtatttattgaatgttgagtaagtaaatgaacgagtggattttaaaaaatcaatcctaggctgggcgtggtggcacacatctttaatcccagcactcgggaggtagaggcaggcagatttcttaattttgaggccagcctgggctacagagtgagttccaggacagccagggctattcggagaaaccctgtctcgaaaaaacaaaacaaaacaacaacaacaaaatcaatccttctacctagggatgcatacctctgaaatcctatcactcaggaggcaaggtcagtaacactgtctcaaaacccaaaccaacaagatctttctgactaaggtctgtaaactggaggtcatttttacctcatgcacttttccaagtactaagtcaacagggttcgctgagagtcttccaagtgctttgaggggaaacaagggaactgatgagaaatggcggactggcaggccaacataggaaatcccctttctggctctctccaactttctgtccagggctgatttcctaggcttccaaggtgatgtggtaaatggtatccttttgccgggggatcgaatgaaattgtcactcccagggagagaggagaggtatgacagggtgtgaagagtaaatagaaggcagccagatctaccccgtgggaagctgggtcggagagcggaggagctggtgagaagactggctcgggccagaacatgtctgcctgtaaaggagagaggcttcgtctgcttctcacatagtgtggtttggctactttcccattacttccccggagaactcttagtgaccagagacatcgtattttaatcaagatggttcttgctgaactggtaagctaggctcccatgggtttagtggagttatagcagggtgaagagagaggctgctgttcataaatggatccactccctctcttccgctgttggcggctgctgcggtgtctataaacatgcagggtgtcctcatgtactcgtaaatgctgcttattgccgtgtgactgcattgtctgtggaagtggcctgcctggaaaaagtgactccgtttcactcttctgtactcattgttcctggaaccatgtcctgaggtcccaggcttttattttgctgccattctccgaagttgcctttttgtggaagccttgggattctagagagtttttttaggcttaaatcatgcctccaactagctgctgtgagctccataagatggcctggttttacttggccagcaaaggggtgacttccccttccagtcattccctctgtcagttgttggtcatcttgaaaaactaagactgttggaggaggccaaagtgaacttgcagagcttgttcactgagccagactgaaaacacgtgattaaccggccacacacaggctcaagatgacatctcactcatgaattgtggttaatgccccaacaaagcccagatagctaaagcgaatgtacatctatgctttctgccaggtagttttcatgagcttcctgggatgtcaatatgcgtgtataattaagatgatttcattgtattaaaattcccatagagatgagccaaggatgcaataaggtaaaatcactaggtctagcaagagtcagcagtgaggggctaacgattgctgtggtaaaataccacgaccgaagcaacctggggcggaaagggtttatttggtttacacctccacggagtgtagtccatcaccgaaggaagtcaggaagggaactcaaacagggctggaacctcgatgcaggagctgatacagaagttcagtatgctttcctatagaacccaagacccgtcacagggctgtacctgtgtagtaactcacctagaagtctgcctggcattaccaaccaccccagtgtcatttccaggaaaatataatccaaactcttgccttgaacgtttcaacgttcttactatttcattctatttggtttcattaacttcttttgtagtctctgagttccactcaaggcaagtgctttagtacctgagctgcacccagcccttcaccatttagtgtcagcctcaatatttgtattgcagaggaaagctccacctccatcgagtctgtgatttgtgtgcattcacataaagcacccttattttcaaagagtgatggcttcagtcttataaaaacaaatgaagttggcattccaatcatttggagttagatttgatcgatggggtgactacaggttaatcgacacctgttaatagacttctaaattaaaatatagtcccatcactcccagccaagaaatcatttttatgtttagtccaaatctttcactcttgttaatttctctatatatcctgatttccttgtcccatcaaccgtcaaaattagtctggtcatgatctctttgtttaagatgagggaagcaagttccagtgactagctacacagctagttagctagttagaaacaagttcatcagaattctagtctttctgcttgaccaaatagtcatctatacatatatatgttatacattatataaatatatatatataaacacatatgttttatatgtgtttatatatattaactatatatataatatgtgttttaacctattttttagaagaattgagtaatctgaccctggcccagaacagtattttgatcatgatgaacttctgtttaaagactgtagatttcttccacaattaagctctcacgctacctctaaccctgactggtaaaaatgtcatgataaagggactagaatagtatggtaggcatcagttgagcatctactcataatcctttcaggctgttctctactgagggaagaaacaactcatatttgatttctgtcctttatgggaccttgaccattgtctctctcacttcattctatagttaactcagagtatctttgagataatgagatacaatgggcagtaaataaaaatacatatagtacttggtatcaagaagcttgggatgctccacccggggatccatcccataatcagccaccaaacccagacactattgcacaatgccagaaagattttgctgaaggggccctgttatagctgtctcgtatgaggctatgccagtgcctggcaaatacagaagtggatgctcacagtcatctataagatggaacacagggcccccaatggagaagctagagaaagtacccaaggagctgaaggggtctgcaaccctataggtggaacaacaatatgaactaaccagtacccccagagctcgtatctctagctgcatatgtagcagaagatggcctagacagatttcttccacaattaggctctcacgctacctctaaccctgactggtaaaaatgtcatgataaagggactgggaagagaggccccttggtattgcaaactttatatgccccaatacaggggaatgccagggccaagaagtgggagtgggtggggaggggagcaggatggagggagggtataaggaactttcagtatagcatttgaaatgtatataaagaaaatatctaataataaataaataaataaataaataaataaataaataaaacccaataaaatagctaatcaaagagaagaagaagaagaagaagaagaagaagaagaagaagaagaagaagaagaagaagaagaagaagaagaagaagcagcagcagcagcagcagcagcagcagcagcagcttgagatggataaatatatacggaaaagactgagctggagagacttctcagggttaaagcacttgctgttcttgcagaggaaccagaatcaattcccagcacaaccatctgagactccaggggcttccacaccgtcttctggcagacacagatgtagtatgcagtcacaatgcccatacacataaagtgaaataaccattttagaagaaaggataaaatgaaggaagaaagaaagaaagaaagaaagaaagaaagaaagaaagaaagaaagaaagaaagaaagaaagaaagaaagaaagggaggaaggaagatagacagacttagaaagaacagaaataggagctggcacaaagatcattgggaaatatgtctagttatttggctctggccagtggattatctggcctgggattcctcaaccagaccattcttgacatctggaaccagctgccccttgactgtttaaggctgtcctgtacattgttctgtgttagctggaggtctgcctttccctagtgaggagatgccagtggcaccacctcctaccatttgtgacaaccaaaatatatctctagacattagtaaataactacaagtcagggtcaggggagaactgttctccatagagattcactaatctcagatatattgtctttgaaagccacatcagaagatattttgtgagaggatagaatggccttctgaattataacctcaaaagttagaactttagacatttcctaaccggtacaaatacacattagttttgttattctttattcattcatccagaaaggcagctattgaaaatgacatgtcaggaaccttgctaagtctagacaaaaagcagaacttacccacaagctcttagaatttaaacctattcaaacgctactccgtagagttggtttgctcaccagtgctaatgaagttaaagttttgaagttgtgtttcattatgtgcctttaacgtggattagccacatcatttattagaccagtacaaatgtcctcaagtctactttgaatcctattggtaggatgttggaagattcctgagatatgaaggtaatatcattaaagctgaaagactcagagtccaatgaaaacctttcattaaatggctttcagtacatgttttagttggttggttggttggttggatttttcactggcccatctgggcccaaactcactcatgattctacccagccttacgttgtagtgtattcctttaatttactcaggcctttcttcctaaatgagacattatacctagaaaaaaccagatacttcttattttactcttagctctaatctattagaagaagttcatacatcttgtaatttgctgctaattccctaccagtgcttggtcgcatgggtgggcattttagttacaggcaagagggataaggagatgctactgacatgggctgaaagatgatgcttaggtcctacaatgccaccaagagccagtacaactaagtgatcagttcgaagaatttccagatcactagctgagtggcacattcaactttaaacccacacaggtttggggaagtatactcgcccctgatctgtggtctgaagtctgctagtgagttcaaaattctttgaactgatcactttttgtcattgtcgatcccaaggccgtactctaagaggcacggtgtgaacagggaactcccgagagggtgggtggagaagaaattttgagggaatgggtggaggtataagtagtcttttggtgtgcgacgtgtgcatctgtgcttccatttgcatacgtgttttattaaattagtcagtgactcctgaaagtttcttctttttacttttcaaaggcaaaacccacttgtagaaataagcttaatttattttattttttattattttttaaagatttatttattttatatatatgagcacactgtagctgtcttcagacacaccagaagagggcatcggattccattacagatgattgtgagccaccatgtagttgttgggaattcaactcaggatatctggaagagcagtcagtgctcttaacctctgagccatctctccagcccaatttattttattttttgcgattacaatataatttcccccttctctttactccctccaaaacctcccatagatttattgttagtctctttcaaatgcatggtatcctttttcattaattgttgttgttggttttggtggtagtgatggcatatattcctaaatacatgaatacaacctgctcagtccatataatgttacttttgtgtgcatgttctcagggctgaccatttggtagaataaccaattgatgcgctcgtccctggggaaagaccatttctcctgcgttcagcattccttagttgcctgcaattcttttgtacagggttgaaatcttttgagccttcctccatcaacattagcatgtttattgctgtcctccttgttcagttcatctttaggctgccatgttggtgagactttatgggtatagcttctgacatttctaagaggcacagtttcacaccaactccctgtatttctggctctttccacccctcatccacaatgacacctgagccttagtaacaggggttgggttgtggatgtatcggttggaagtggactccacaactatacattttgattggctgtggtttctttaatggtcaccatctgttgcgaagagaagtttccttgataaggggtgaggactacacgtttagggctagaccctggagaatgttgtcttgattttcttagtttctgatcactttattgagtgaaataaccaggtggactagggaaggaaataaattttaaaccttcccttcttctgaagatatttgtctgttgtttatgtaacagggattgtactatcacaggaaatattactttaaaaatgaaccaatactcaaaaggtaagcatcttccaaactggctgtctgagctggtgtcagcaataggcaagtctcacaattggtagctgcctttaatcccacctggaaataatgaccattagagaacatgtttgtttggtttcttttctagcaaaaacaaaaacaagacaaaacaaaaaagaccttaaaagattacacagggggacaagtgaaatggctcagcaagtacaggcatttgccaccaaacctgataagctggacttgattcccaggcctcacatgaaagaaggcaagaaccaaccccaacagcttgtcctctaacctccacaggtgtgtgtcagcatgcatcatgcttatgggcacgcatgcacatgcacacacaaacacttatttttaggggaatacacatttttagtgtgtatgtgtgtgtgggagggggtgtaacagagttacagacaacttgtaaagcagtcatttgcctcccatgtgaatagccacatgtctggtctcagcattgtccactggccgctttctctagccaagactcctccccccacgcccccagcccacaaaggaaactgttgcaatctatagatctgactaaggaaatttgttttagggtcagaataaaaggtaccccccaagtcatgtcatgctctagcattctgtaatactgcctactggtaaaaaggaattatgtcttaaatatacaataacaagagttccataaaaatcattgtgtcccctttagaaccaggggtgtctctccaaggtcaccagtaaaagttccactccactatccaccaatcatggacaacagttgtgtttaaaaagtgggcttgtcgctgtttttcatgcaggatgattactcagtggccatgaccttctgggttgaacggaaagggctctgcagagttagacagcacaaggacaggagtcgccgtgggagtgtgctgcaaacagagatgggctaagttactcagttgccatctgtctctgttttgctaactcattagctcggacaccacattgtgttaatccgcacttcccctggctatgagcttaatccaagtctccagggaacagagggactgctcagcctgactctctcctcagctgggtggcaacttctccacatgggcagcatgccagacctgccacccttccctgccacatcatatggaggtgaagcctccccctccctagcctcggcaattaaaatggaagcctctggatgttactattcttcctggcaatgtgatacattttgctctttctcttcttagtattccttctctgtaccccttccaggcccttgatagttttaagctcgtcatagaagaagcttggtgacattaggtaccccacccatcccacaggctcttgcatgctttctgaatctcttaaaagagcccataccaaagctaagagccaataagcaaggctgaattcatttcccagaactaaccaccaccaccaccccccaccccctgagaaggcaaggctttaactagcattaagaacatccaatagttctgagagtaattctttagaaatgttggaggctaaagagatggctcagcagttaagagcactcactgctcttacagaagacctgggcttcagtcgcagcacccacatggtagctcctagccatctacaactcccaggcactcatgtggtgcacattcatgaacatacattaaatacaacttttaaaaaattttaagaaacagtctctcccccctgccccgccccttcctggaatacacaaattgttttcattgacttatttgcttattttgatcgtttttttcttcttaacatgaaggggtgttttccaagcaagactaagtagacatttgtatagtcttttcccagatttaacagaaaaagtaggccagtgtttggtagcccacacctgccatcccagcactgatactgaagcacgagaaatgccaacagaaaaagaagaaagatggatggggctgaggatgcaactcggttagcagagtgcttgcttaccatgcaagaagctctgggctccgtacatagcacgccatcaataggacatggtaatacctgcctatagccccaatactaggaaggtagaggcagagggatagagagttgaaggtcattctcactttcattggggatttgaagctaacctggactagagactgtatctctcagtaaatcctgaaaacacactgtgctgtgggtaatggggtttgctaatattgatgggaacaagatgccctagatattgatcatacatggcctcatccagtgcatggttcccaataggtaagatagcatggctgtctctgggtggcaggtcaagaaaccgaagcccagagaggttatatcgctggtccaaaagtaaacagctaataagcatcaggggcagatttcaaacccaaagcttgtctccaaagtctggccttagcctttctctgtgtcacctaaggagcttggtccctcagccactttgttgccctctttcccgtgtcctttccaaagttttgggattctcagatctgatcccatcaactatacactttggagtttatcagttcctccttcttataaatggcaccctgagacaaaagcagggacttagaaaagacacgcacacaaactaccagaactcaaaggtcctgcttttgtgccacggtgtgtgtgtgtgtgtgtgtgtgtgtgtgtgtatgtgtgtgtgtgtgtgtgaagcttctcacctactcataattaggatgagcagaacaggaactttggatgttaaaggctaagttttctttgactcacttgagcgttccaacaaggaactgcctagtctatcttcatggacaagtgcgttgttcccctcttacatggtgagtgatctgtgcaagggaaaaggtatctacaaggccctgactcacacacatggctacatgccattcttggttccctttttggctgaaagacactcactgaatatctaactcctctgtagatagctggagttccagtaagttctgcagattccctcccacactcggcacggcacacaggacccatgccgacactttaaaggatagagtggcatgtttgctttctcattctttttgtctcgaccctcacaatgcctagttaaacactattaaacacctacccctatgcccttcccatctcctccaaaaccactgaattgcacatgcctattagcatcagcaatcctggtcccaggagagctcctagctgccagtgggaagaagactgtttctgcctcttttttggtctggactttccaggttaccaaccctatatcacctgcaaagacatcctagaaatcagggtggcctttacaacctaaaatgcccaaagcttgccttatgacagagaaaagtgtagtttagcggagactgtattgccttcacctctctgtgtgtatctggatctctcctagggaaaagaaccctagtcccaaaacagcttatttatcaaaacagcttatttatcaaaatagcttatttatcacttatttatcatgaaatcactaaggatttgggtccaggtatcagggatggccgctgctttcccacaagagacatcaaccattggcccgtttcctctcaaactccagttccatgtttaagtggaaactcagaaatacgtgtgctggagggaagacaggagctgagatggagcaggagtttgctggccagtagaaaggctgttcttttcagttcttttacgtcgtagcagtctcccatggataggatccaggtatcttgtaggcctgcaccttattaaactcctgtttgattcagaatttacagcaaacgcacctggaattcttcaaacaggaactagcagagactgacaaattgattgtgtaacctacagcaaatgccctcaaatgccaagaataagatggtggcacatttctcttaatagctttcttagtttataaattcaaccatgctgatttagcgtctgctattcaagaggcatgccaccacttaaacaggatgtaccgtaggcacgccttctctatctctgcctgcttttattgcatgtgacagaaaccatgctcaaagtactggaagcagaaagtgaagttgccacagggataccaggtatcaggaggatttggatgcagttgactgcaggagcagatggaaacactgttaaatacgaagctcagttttctgtataccctgggtcacatagagggcgcctccaccaccaccaaatggaagccacctagaccctcagtgtcacatgcagctgctgagtattcaaaacatggacttcagagacttcatatatgggagatagagtgaaatgccaccaaatatattaacttctatgttggttacacctcgatctgacggtagtttggacacagtgtgctaactaaaataaaatgttagcatctgttttgcttgttttcacatagccaataaaaatcttaaatgacatgtgtaccctgaacgatatttctgctggacaattgcgtctttccagagagtttccctagatgtgtacagcaacttcagtcccctcatgctaaagcttccttgagatgctgcagagacagtcatcaatctagtgtgtcattctaacccgtcccttcccattcacagtcacttctgcttgaactggcacatttccagttttcttttggaacagagatttaaacattcacacatgtcaaaagtatttcttgagcccctgttctgttaataagaagatctcacactaggaaccggggatacaaggttgcccattttctcggagttccttttagaagattcagccctttgttttcataaatctggccttagttctagacatgtgcctttccatgtgatgcatctggtccggcatcagcctttctggagaacctgagatgaatgaaaacacagcctttcagagtcaccatcaatcctgtgttgtcagaaagattcacaggctgctaatcttggcagaagtcatgaccttttgctgatgtcagttcgtgtttttctttccggttaatggaaccagattgcggagcccccttctcagacacggagctgtgaaggtagaattgtctcctccttgtcagtgagcatccccccccccaaatatacagctacacatctgcaagtatagtttgaattctccctcccttgtctacaaagagccattctctagactccccggaagtataatacggtgaagcctctgagtattttctatattctaagcaagtatctaaaagtgtgatatacagtcagcaataggtatgcattgtacagggacagcaccactaagtttctccatgaacacatatgtgcagccaacttgtgagtatgaaacagaacactactggtttccaggacaatccctccccctggaaccatcctttctgccttcccgtcccatgcccagaataaccacccactcgagggttgtgccaccacaggttagtttgtccgtgtttgaactctctgtaaacggtgtgacgacagtttctcactctctggtgcaggttctttggcttcacgttgttcgtgaagtttatccatgctcttttgtataccaatataaaatgtaattacacaaaacatatgtataattaaaagagtaagaaaagaaaaaaagaagaaaaatataggtagcagaaaaggaaaataaagattgtgatcccactgcagtgataggagtgtaaacacaagggaggctgggatgttcgaggcgttcaaggctggcctggatgcaaaggagacctctttgcttactgcatagtaagatgacgcaagaaatatatgtataataaacacttggagtgaggggttttttctcaaactttagaccataccatagggtgacttatggtttctcattgtgcttattgccccagcgtgctctaaatattcgtcatctgaaagagcatacacatggacttgaaccaaaagataatacacaagagtgggaaataattttctaagttaagaacacagatcattatttatattaatcatctagattagtctaaattctgcctgccctagttaggcttccagaaggttcccagattgacccctgggttgttagagaaatcagatacttgggacccccttctttctccatgactcttctaagtgtctgtgtaactcagtcaggtatctgctaatgtgttagagattaggaactgctcaaatctgaaagcgctttgttagaatctctgttcaagtcctggcttactctagacaaatctgtaaaatgcccctcatttctcagataaatagcttctccacatctgtttgggatcatgagaatccttacgtaacattctggagtccttgaatgaaaagttccttggagttgctgactattcttaaaattccctcaactagtcaaacattgctatggatagagtggccgagctgggttacaaactagactggaaatgttgaatgttgggaaaaaaaatctgaccacttatattaagaagctgtcttcttaacttcctagatgcttgcactataaaattaacctccagaggtgtgtgtgggtgtgtgtgtgtgtgtgtgtgtgtgtgtgtgtgtgtgtgtgtgtgtgtgtgtggtcttgctaagcctttatatgtggagtcttcatccttttgttttggattagagagctcttaactctaaaagctagtatccctagttcctgaggtcagctggattagtagagtcctggtcaattctaacttgcaggagtagaagaaacatttgacttgaattgtccattaaagcttcggtttgtgatctgagagtcccccagacagtgttaggcctgcctggggacttggattcagtgaagcctgaaaggtagagagtatactgtagccagaaagtgctggagccaactctgcagagacacagttgtacagggattctcagaggacggatgctgcaggtgctctagtcctgttgcttcacttttcagatgggactgaagcctaaggaggccacagagggagttggaagtttattctgatgtttcatcaacagctcagatgtctgcagagttcaggagacagagggaaaggtgagggccttagtgtaccagggctgttcctggctggatctgaggtctagctcttacctgggctaaagcgaagtaccaaattattctttcttatgagggattttgtattctatctaatcagaacttagaaacttggacttaggctagaatgtccagaagttcagttcaggagagattcaccaggtatttcccccccaaaatataccgtcttgggtggttaactatatgagattagccattattgtcattaaaacaccacactccctttttcttatggtgttctttttcaaacgtgtgtctggtgacctctttaccttgcttttcaggttttattatatttcagttatatctggtatcagctgttgaatctgcagtatgcagaaatgctgaggcttgcccttccaaaattcttccggggtcaattcccattatagcctacatccaggaagtgagactatttccagttcgctgggaaccatcttggctttgagcagaaatgggggcctgaatcattgcctaagagagctttgtagattgtcacagttggcagcctcaagatttgagctaatcctggaaattccttgacttcccagaaagaaggttccacaaggtcaggctgaggccctttgagagcagctggaagagagctggcaacccgtggcccttacagctggacagggagatgaatacaattcacccccacccccccagccctgaagacactggttttcaggggatagttattcgttattccttttcctctgtataaagaaaagtatcctgcagtctctgcaggagcagcaagcaagcgacgcagttcccatggtgagtgcaaagaccaggccaacaaaaacagcctaagcatcacaaaaatgggcttcctccggtggttgcatagtcagtcctttatcgctggtccctgtaaccaaccactccctcaccccaaagcatcattctttactgctatccaaggtcattattcttgtggcaggaactgctcctacaaacaaatcttgatcttactgtcttacccctccacctcttggtcagtgcatcatttagaaaaagtaaatgttgaagatgagagagatgagctcaggcagcttttctaaaggtccgggcttagcagcagctcaagcaccaaattataaactcctgaaacctgtataatccagttttgattaacttgaagatcagcgctgcttttttttttttttattaaaatgaacttctgtgtcaatggaaaactgccccggcacactggaccattgttcacaggagggggaagggactggcaaatcccctatctggaaaaggcagatcaagtcctgttgttcccaggccttcctatactttggggaacttagtataaattccacggaatattgggtgcgtctctggttcgaactgaggatcaggtcatgatgcactttgccagattctcactttaagttcttcctttccggccccttcagcctcttcctgctcctctgctctctagggccacctctccgcttcaccttgtcacactagctgctccgatccttcctgtcgtagatggatagtggatgaaaaggaacaaacactctataagaagacaagggtgcagccatttccgacttgcgaaatggtttccgatgatcagggactaaggctcactagaagcaatcttcagaaactccttcctcgtccatcacataaggaagaatccttcactctaagcatctcctttcctagggaaggcactgcgactctggtgaagaactttgtctaacctaagtgttaccatctgaaggcagcctccatctcgactcctgccctttcccctccagcccagtgcagagcctccctccagacatgctgattacaaaacagtgcttaggagaaaaccccaccctgtcagcagatcagttttacaagctgacatgggacatgtgcacatttggagtctggagagtggctgagctgtacttccagtccagcctctcctttgctggcttcagcgagtcacttctccttcctttgtctatttcccctattgctgaggagaagataatgaacctttccacctatcaggctcgctggagtgctataaagaataatgaggtgatatttgtaaagtgctttgagccgctgggaaagaagagggggcgagctaagcagaaagcattctgagctggaagcacttatcaattgagctgcctaacaatgacagggagtaagaatactcagaaatgagttccagggaccagccctgctttgaatttaggaggaggattagtgaggacctaataggtatcccacttctccagtttctttagtgtaccatcagacgagaaaaggtaattgcattcttctatgtccgattcagcctgtagtttcaattgggatgtcagagtgtgcttgtcttctgttctcatactgaggctgtgttatgtctcgattgttaaagccgtgggcatcttctgtcccccgggggatttcacttaggggctatacaaagtagtttctatgcagaggctgggctcacagtttataaggcttattagtggaacttctaagtctaaagtgcctggggaccaattctgctgaaggagagaaataaaaggaaaggtctttatcatggtctttttccctatgtggcttcatgggaaatttctcagcaactcagatcaatgcacataaggtataaacatgggactttgatagccactgtggagtccttgtccaggtgaaaatgggggtgggggtgggggctggctctaggttaaggtgggcttaccaagtcactaaaggtaatcagagccttcttttagtccctccttccctcaagagggtcaaatgagagatgtctgtggggcctcacatgtgtgggaatgtttccaaatgttcctgtgaggggtcagttcccacaaacccaatctccatttcttcaagactcggagccccggcaggttgttgccattttcggggccagcagaaagagaaaatgcagaggaaagagagcatgcagaactgggagaatgatttgagctcacataactctgtgggctgactaaacattgagtggggagtgtgcaaccccctcctagcaggcaggagcagggctggatttatctctccccctataaatggtacaaagagaggtcatgggaccatttggaacaatgatttttctgatcaaagttatattaaggaaattacactgattacatcttagccccctgaagtttacaagccgttttgtaattactacttctgcaaaccgttccctctcttcaccgcttctcgggtcctctggcttgcagaggctgctggactttctcctccaaaaggatgcgttcatcagccagccagggcttcctgcactatttgttctttgaaatgacttctgagtctcctggggcattccccagtgtggcacagctgcgtacaccacgcccactggcatcctgtccccatgccagacagacccgcaggggcatgcattctcctcctatgtcctatcgtgctatgccaggcaagtacactttgatgcctgctcttcggcagaggctgactggcctctgacccaggttccttcctaacccatgtttgcgttcgtctcagcaagtcactcttttgtcctctctcaaaactccaggtttcttgtttgttgtttgaatggctcactcttcaatgcctggagtctttcttcatttccccctcctaaggtaaagctatttgatcccagacatgcctcccccagcaggttctcagggaaggaagcaagagactttggcctggactcctgtcctttctttcacctctgccagtgctcagtcaagagcaaggctgaccttccctggccaagcctgaagagaggctgtgggacgtggccttccctgctgctgctggtagctgatgcccttccttttctttctcctggaccctgagcaccattgccccagtgagctgctgggaacagaggtctggcggctactttggcctcagctctccaacacagaacatccaagcatcaatgggaaacagcaagatctgtcagcactgccctttcgtcgggggtctttgagggccacattctccacggccatctgttccctttcacctctctggacaatgtcgcttttttttcaagccagcaactctccctctttatccagtcccctcccacctccctttcttcactcctgatttctcctctctcccatccctgtccttcctcgcactatgaaagtagtgtccccttgggtgacacctccacccccagagcagcttgtaactactgtggggttttgactttttattgaaaaatccctttggaattgagagcttctacttttaaagtttatgattgtggttggggtactcttttgaaaaggacggcggggaggggagggtagaaaacttctcagtcctgaagaaaaatacagaataatgaatttagattccctttggcaggcacttgcctcttgaaagaatccctgcttagtgattagtttaatggaagtgctatgtccctgaggtctttctgccatttgtcttattattgttttgtcctacctgccatgttattacactgttgtttgtttttatgtgtagccgtgtgtatgtgtttgtttgattgactatttgtttgtagcgatcaaaggacaccttgcagaagttggttgtctgcctctaccatgggggtcccagggatcgaattcaggtcattaggtttgggcacaagcctggtcagctacccaccgagtcatcacactgtccctgttgtgctgtttttaatttcgagttagaggtgctgtggagcctttcatcttgaacagagccataggcagctacaggagttcctaggtgcagttatccctgggaggcccctaggtgaagcagcaaccctggttacaggggagatgcaaaggggtatttgatctagtcctggccaggggctgtgtgcaatgtgactctcctaaggaatactagtagccttttatgtgaaacaatcattaacacatgagatttttgtttgcaccattgctgtttcataaacatgataagcctatggtaataatcatggaaactttatggaaatctttgcttaagagtctgtaatgggttaggccatggtggcacacacctttaatcctagagctccactcgggaggcagaggtaggtggactccaggtatagccccgcctgggctaccaagtgagtaccaggacagtcagtgctacacagagaaaccctgcctcaaaacaaagaggctgtaatgattcactgttagaattgaactcagagataggaagtatggaggcccaaggtcccagccttaccgcctggcagagctgagcataaggctgacacatgggcccggcagccagacagcagggatttgaatcctggccctaccacttgatagctatagaagtaaggataaagctgcctcctctccgatggaggagcaatggtaacaactacttcatattgctggcagcatggcgaagggctcctaacttgtacaacagtttctggtccacacagatgcttgtgttagccatgagtatcagccatcttcttatccccaaaaacaggatgggttgaaaataaaccagctaagctttcaagatgtttttttttgggggggggggggagttgggagggggcaggtcagtgttgggcgatcatgctacaggagttggttttcttcctctatcgtgtgggttctgaactcaggttgtcagttttggtggcaagtgcccttaccgaaagtagccccaggctggctttgtccagggctcttaactctatcactcgtgccttctgcagtttttcattgtagagttaatgctaatgaaaatataccaggaaattagcaatggaaattgaaatgaccaacacagcacctctacttagagatgccataaaatacaggcatgtctgaaaacataaagagatacataatcacgtatctgtggcaaagaaatccagatgtgtagattatgatcatagaaagacactcgaccagttttaacagctggggatattttacatattttacatagccgaagaaaacctgcaggtttgtttttctttgttgtcagtttcttgactggatttcccaacaacagagagagaatttcattagaatatcttttctagaaaggcaccgagaactctaaatgaaaaactacatattacaatttgttgaggaagaagaggatatctggaaaaatggcgtgggctgaggcttggttacttttccctcccagaaggaaataatgaaaggagaaataatgagttagaccgtggggctcacatcctggttgtgccacttgccaagtggccttgggcaaataactctcttggcagctcagcttcctcccttagaaaattggtgtgatggtggtacctccctcacggagacaatataagtcgaggtgtttagcccagcacccggaacacactcattatcctaaaatgttacctcataagtctttactgttatgtcaactgatgtctgagatgcgggacacattacacaggttggtggtcttgattgctctcctgactctggtcatttttggaaaacccgtagttctatcccatttctggataaacagtggctgtgaggaagacggaaattgctttgcttaagaattcatattttgcagatgtatcctgactgcctactacccactgaaaccagttcccccagttaaaaagactctgctggtatcagcttctctcccttgtcagtttcctctctgccatgaggtcgctttctaaaactacttgactaaccctcaaagatctggatgcctctagggaagtagagaatgttgaagcaagattacctcattgtctaaaagtaccttcagcccttagacctatgcacttggacacacacaaacacacacacacacacacacacacacacacacacacacacacacacacacacacacacacggaggctggttatctacacattgttgggaccgtacaatataccatctagtgttcactgtgaatgtggtacatagaagagctttcctctcttctatgcccctaatttgttgtgagccttgtgttggggtgttgggggacatctattcctcccatgtatgcacaaccctccaaaagggaagtctggcagcttctcctaaccttggttcaaggagaccatgttacatatgtcaaacaaaggtaggccactctgagggagcactcgaaaggctctggcaaggccactgggaggccttcatggaccggagctcctcacagatccacatctactcctctcccctgctcagtgcctttaggggcacagacttgtgtgccgcccacattccattctctccatacaagagtgtatactgattcctatcagtcattctgcttcccagaggggcaattgagatgggtgggaggaaagcataacaataaatcctcacattcatgctaggtgataattaaaagcattctccaccgctgtttgcttgctcttagatgccagaaggaaggcagctgggccagcagagaggcctgaactcaggcctcaacaatggctgcagcaaggtgggctacagtggctaagtctctccctctccctctccctctccctctccctctccnnnnnnnnnnnnnnnnnnnnnnnnnnnnnnnnnnnnnnnnnnnnnnnnnnnnnnnnnnnnnnnnnnnnnnnnnnnnnnnnnnnnnnnnnnnnnnnnnnnnnnnnnnnnnnnnnnnnnnnnnnnnnnnnnnnnnnnnnnnnnnnnnnnnnnnnnnnnnnnnnnnnnnnnnnnnnnnnnnnnnnnnnnnnnnnnnnnnnnnnnnnnnnnnnnnnnnnnnnnnnnnnnnnnnnnnnnnnnnnnnnnnnnnnnnnnnnnnnnnnnnnnnnnnnnnnnnnnnnnnnnncctcttcctctccctctccctttctccctctccctctccctctccctttctccctcattccctccctcattccctccctccatctttccctccctcattccctccctccatctcttcatttatcagctatacgtacaaccccagagttagagacacctgaggatgtctgtctcctgtcccttttacttatcctgactccctgagtgttccttagtcagtgacagcaagagctggacctcttggatgctgaaccactttagtgccttgaagaacttcaggccaaggagcataacagaggaaggcgccttaatgagagtccctaaatgacggacctggcccattctagccctgacctgttttatgccacaaactgtcagctgtccctcctccaccctctctggatgttttgggtggcgcctctgacagcagctccagacagatgagttatggccactctgaaaaagcactcacatctctcttccccttgggagctaggacgaggataaagtcagcagacaacatttttaaacactgggccaaagggcattctgcagagctgtgtctccaagatgaaaaggatacagagcctgtgtcacaagacactgaagatttcccaatgcaaacgcacctgggccattgcaaacagaaatgcaaactcctgctacgtgtttgtgctagggggctgggggtgaaggcggggggacgacagtgccagtagaagttctggtgtcttagatttggggtttgaatcctggaactccatattcaacaccttaaagggttaatcaggtgattctgatgtgagaaacatttgacccaaccccatgtcctgctattgtgagtggcccagtccatctctcacaattaacttacatttttacacaggacatttctaagaaaactacagtgagcttgtgtgtnnnnnnnnnnnnnnnnnnnngcttactgtcattatccacctagtttgtgatatcatgacgttgttactgtctttgtggcaccatttaacagcacgttgtagatgtcatagtcttccatcccctgagactttcatttgtctcccaagaacaacaatttctcttatacagccagccatactacatttattctttcacccaggaaattaatattgatacaacactgtaatgtaatataagggcaatatttaagctttgccaggtgtcccagtaatgttgctgtggcaggccttctagagttcagtccaggattagacactgtgtttagctgaagtgtcgctgaagatcttttggtcactggtttcacagaaacatttttcttcaagaacatacttcctgataaatcctctctctctctctctctctctctctcttttgcctcttggccttgcctcttgcagagccagtgagctgatgcaggtatgaagtaggaactgctcacgtaggtctaaactaaacgtagtaggtttcaactaaacgtgaagggactggctaccagacctgggatttccatttctttgtgagctgagttcccaaagtcaaagcatagctgtcagagagtccccttgcttttcagctgagtgggttatcacatggctctctcattatccaaactaaggcctgaaacatgtacagcttctatatatttcctgcgtcttaagtcttcctaggaagagtaactgataaaggatatgccttttttttttttaaccttttccagctctcttcaaaggcagttgtctggatgtccatgtctgaggaatttctctcaccccagcagtcagggttccaaccaacctgatgtcagactagacagctgtgttccttctccattagcccgtgtttcccgaaacaaacatcagatggccaaaacctaagatgatgaccatgcataatacagatttactgagactgcaactctggcatcctccggccgcctcagataccatgatgagagcaggaaaacaaaattcagaccaggacagctgttaagtgcaatgtgaaaaatccatagcaagaggatagaaatacatctggggacaagggacatctcatgtaaacatcctggcttattttaaatgagcatggatttttttttttaatgtgcttcaggtttctttaaatagttcagtttttgctttttttttttttttttttttttgctagtatgtgtgtgtgtgtgtgtgtgtgtgtatttccattcccattcgtgtgcatgaattcactctaataagggaattcattattaattagagattctcctcagggctggaaagatggttcagcagataagaacacttgctgtgcaggcatgagggcctgaattcagatctccaccatccacataaaaacccaggcatggccacacctgcctgtaacatggcactacagtgggtccctagggctcacagcttaactccagattcaatgtaaaattccagcctctgtggaaaagcaggacacctaatgtcaccctctggctcacccacacactgcatggatatgcacacctgcacacacaacttcttctcacaggttgagagacttagtttcaggtcatccttcaggactgtccccctccaatagaaagtaccagggagaaagcagtactcctggctcaggggctccagtgatctcctgggtggtgttgccagctgaacccatgagaggagattgcttctttctactcagacactgggactattcctgctatttttttttccttagctatatttaaagatattgacgcatgtcactgcaagcacagcccagaagaagccctacatagttgggatagtttggttgccaaatgggacagtgttcagattgaccttttctaagagggagcctcctcaccctgattccagacagtttctccatggtaaccctcttagatgacacctgcattcacccaggacagtcccaagtcatcgctgctgtccccttatgactcaaatgagcccatctcactcacaagtatcccgactggataataacttacacgaccattccaagactctgggaaagtctaagtattctctccccatacaaaaatcagcggggctgtttgaatgatttgtgctggtgcataccaggctttatcctagtggtgagctcaccccgcctctgctccacctgctgctaggggaggttaatccacctctaaatcttgcattccaaaggtgctgattactctaccatagcagatggcttctgcttccctttgctcagtctccccaggaatgagtgttactggggcttgagtcgggctgagcatgtgatatgagcaaacactggacagcaatccatcccccttctcttctagctgagagagcccagagacgacaatttctccatgacctaagcaaagtggcctggtccgctagcaggtcactgggctgtgagcagatggtattgggtgagacagttgttacatggctttatgcctcagatcctttccttgtaaatctgaaagactaatagcttccaagtattttgagaatcttgtaactcagaaggttataaataacataagctatttctttctcatctaaaatggcagtccagtatggttgcttaatagttagcgtgtggttcctgggccagtctgtacagctgatggtgtttttccagtactctatttatagagctaggtcagaaatgtcacttccgttggaacttgacctacagacgattgtcagttctagagacccaaggaagcagagagcacactaaatacagctggttcacaggttcagttagcgaactgcaagccccccaaggaaattgtgttggagaatagatgtttgagccttcccaatctctctgtttgatatgttggccctgtggctccatggaactcgaaggtcaccttgaatcttcgttttttaaaactcctgttccgggcagtgtcccgttcatcttcaactgcggctgtctttctacatcagacacagtgaagattcttgagacccagctaggcagtgttgactatgtggaaagctgggggggggggggatctgaatgtttcccctacttcatctttctactggggtaacccagattctccgcgcatttccctagatcaaatgggtgagcccatggaaaatgtctgccacaggtcagtggctccctggcctggtctggtacaggagaattggaatcaaatggatggtgatccccatctggtcccagtcaaccactcagactctggagtttaaaagctttgttgattgggaattgtgtttgctagaagttggtcctcgtgggttgtagtaggtagaacagacaaagaaaaaggcctggtctggggagaaacctgttgtcggcaaaggggccgcacacttgcactgtctttaggtatgtatacatggttgctgagcagggcctggcagttaaaggcagtatggaagcactgtgcactcaggcttcctagaaaagacaaggtcccaaataagaagccaatttttttgctgtcaaaatatcatagactctggatttttttttgtttgtttattgtttattggttttgggttttgttttgttttgtctttgtttttgtttgtaagtatacccaaggacatttgaagtcactttgaacaactccttctgaccatgggtgaagctactgaggattggggaaagtcagccctgtggctcactcctgggtgctttgttatggctgctccttctcccaagtgttcctgttgaaagcctgcagctaaaccaggagtagaaccacaggccagaccatcaggcctgccataaaaagttcccatggtaacccaccatccttccctacactcatttcagtcctgaaaaccctgagtattgtcgtttgtaacttcctacttcttatcccaggaacttactttttacccaactggacaagaagaaccaagtattccaaacattcactcctttaagcccttccccttcccttccgttcctattctggaagtcaccactttgttagtttggttttagggggttgttttttgtttgtttgttttgggggtgggggttttccacttatttttaaacatgcataagtctattcacttaaaattgagtcctctgccacagagcaaacatgcttctgctattcactagcaacagtctaacctctcagaaatgtttggcagagaagtcataaatttaaatgttttcagaaaagaaactttttcattacagcacacacacacacacacacacacacacataaacacacaggcccttcctaaatactgactgacacagagtggtaccagctgcccatcaccttctagaaaccaggctccctaacaacttggctatcctcctctagccctgaaatcatgagatctacatcctgtgtgtacagagcagagagaccatgggagaaatgtgttttcctatccaactcccaccagaggctgggaactggctccaaaagatagcagttctgggagaagttttagaagctccgtccagatcctcaccgagtcattcctaagctttgctatctctgataacgattagaatggaaaagaaagaaagaaagaaagaaagaaagaaagaaaggaaggaaggaaggaaggaaggaaggaaggaaggaaggaaggaaggaaggaaggaaggaaggaaggaaggaagaaagaaagaaagggagagagctgcgattaaacatcttttccccctcacctttcatcttctgtgtttgtatctttgttcctgctatttatccttagccatatcaagtatctccatctagggtcaccaagaacctttggttgcctggaggcaagaattattattcgaattttacagatgggtaagcaatcacagaaggagactagcaagctttaactcacctagccaagtctctgacagagtggggcataaggattcccacagtcttttgagagagcctcacttcagtgtgaatgaactaggctgttctggggaccttgcagactctagcctgtgaggatggggaaaaaaaaaaaggaaaaaaacaacccaatcatgaaaatattttcaagtcccagttcatgtctttgacttatttttttatttgtatcggaatccaccaaatgccagacaatgaagtcatacagccttggcaggtctaaatatcacagttgttcaaaaatgggaggaagggagagtgccccagttttcagaacttccgctgaaaatgaacacagagaagacctacttatcagtttcctaaccaatgaggtcactgggcaggaaatcaccttttataaagagtcagtaagcagactctccctgctttgaattttgcataaacagcattagtgagcacttattccagccctctcatgggaatgctagaaactgcaaagacagaaaggaccactaagttctcctgtaggaaacaagaccatgaatgtatagtaactgacagcctccctgttgacccctctcaagtcatctaccaccagagccacctccagttcttctcttgtgtttgaagctgcgtgaagtgacctatctttcctctcctaacctgagtttaagcctctagcttaaaggtcagctgtaggccacctgacttgtgtgaatgcagctgctaggccagttgagcaaagttaaataacttgccaagccagggcatgcatgtgctgccttcgttgagacctcttgccctgtgttatcactgaacatcagaacaaaggaagctgactgtggagtctgagtgacaagcattttcataggagtgataagataacttgtcaggaccgttcctgaaatgggcctttgggcaatccaagacccttctcagcccctgtgcacaggagaataacaagatatttgatcttcaagacctgatgagcccagagaaggctaatcgaagtaggggttagcagcctagttttgaaacctagctctgccgttaatcaatctacgtgactttaaggaactgccttcatctctcatagcttaagtctgtcagtagaactgatagtgttgctatctcataggctcaaaaaatgtgtactgagatatgaaattcaaacaatgtaaggtgcctctatttgaggggtttacatagtgcctagtatatagtaaaattggaagcattgtcttcatcattagtaactttaaaggccttgctggggttattcttacactggcctgatgcttgcaagtgtgtctggaacacgtctcctcaaggtcactcactcagagttttccctggaagcttttctctgtcatttgcccttgcagcccttgattagatcccaaatatatctgaccaaagaacagccaagtgtctgccacccctccatcccgctcccgtgggcctcgtggtatagagtttttcattttgctttatttttgttggttttataaccatttgcttgtttatttacttttatgaaatgtttaaaacagtcacccatgccctgaacgtgtctctgatctctagaaccatcctttgccttcctttagaactaggacactccaccagttttatcaccaccaaaaaaaaaaaaaagttgtaagttcttaaccaattagtaactcctaattgttcacatgtagccttttcttggcaaactgtgaagcacagcttcacttaatccgctcacttaggagatgtataaacagctggctgctacagttagcttgaaaaaatgcaaacctattaattttagcttaaggtagaattaagaatgtaaatatgctgttaaaacaagtctataacatggttcagcatgggaataacttattagtcatttagtcagtgtaagcatccttgtgttaagtgatacagggcctgctggcacaaaccgggcatgcctctggctcatttataatgtgtattatacaaaaatcacacaaataatatgccacaatagaaaatggaggtaagtgagaggattttaaaaggtattttgtaactttagaggaggaaggcaatagttatttattgtgatgataagagaatttggcatttgagaggcagctctggacacagggtagagttgagacatgaggtcataccatacattttctatgagcacatagaaaatcttgatgggcacgaagcccatctgtttagctggggggggggggttgggaggtgcatgccttcaatcccagcacttggaggcagaggcaggcaaatcactgtgagttcaaggccagcctggtgtacagaactggttcctagacaatgaggtctacacaaagaaaccctgtcttaaaaaacaaatacagacaaaacaaaacagaacaccaacaacaacaaccctttaaaatgtaaattgagggaaattttttatgtggtgctatggaattgaacccagggcctcgtatgtgataagcaagtactcttccactgaacaatagcctcagaccaagtcctcaaaacattgatttttggcttttctttttaaaagaaaaaatcaaaagaggtactggagtggtggctcagcagttaagaacattcactattcttacagaggacctaggttccactctcagcacccacgtggtgactcacagctccccataactccagttacaggggacctgacaccctcttctggccccagtgggcaccaagcacacacatggtgcacatatatacataaaaatagtagctaaattatggaatcaacctatatctatagcagaggagtggttaaagaaaatacggtttatagagacacgtggaatttttttcagacatgaagagaaataaaattatatcatttgcagtaaaatggatgcaattggagatatttgtattaagtaaattgagtcccccaaaggcaaatattatgtatttttcttactcatacttcctagattttatatagatccataaaatcttacatgtacatatggtgtgaatatgaaaaggaaacaataaatcaaaggtggctaataaggagggagaagaaagaaaggagaaaacagagagatatgggggaatgtgttcaaaatgtgctatctacttgtaggaaaatatccttctgtaacgcagtaccatgaacaaagcatatatagcactggagggggggggggatagtggaagagagatggaaaggttgtgtatctccaggaaattggaagtgagttcatctctaaggtgagaaagacctggcctcttactaacaatgaacatgcatttcataaccacccaatggctttttagcatttggtactatttggaaaaaacgctggctgtgcccagttccctggggtccacccagatgaagaagagagagatgaaagacagaaaggctaaagacgtgctctctctgaggcaaaagtcaacagagaaggccagaagagtctgtaggagtggggagctttatcgcctgctgattcgaggtcaaggctggtgagaactgagaagtggaaaggacacaggaagctcagagaggtaaagtcggagggaggggcaggggcggaagacaaagaccacagaatatactgttcaggcgttcacatcttatcctccggcatggaggacccaagaggattggatcaggaggcgaggtcatcagattcacatagccagattatttattttcaccttcctctgttcatgttttgggttgtgtacacatgagccagggatactttaaattttactcttttctatttgatgctaaattctttaaacctcctcaatgaagtccatgctattgattttcacccagtgcattacctaactttggggttccagaactgttgtattatcaaggggtgcatagacccttgtcagagtcctgtgctgtgcattacaggatgttcagcaacaacactggcctctaccttctagaggcctgtagccctctcacttaggcattagccaacaaaatcacccctggctaagacccactgaacatcatttctctgctgtggtttttagacccaagaacttgtggctgggtggagctggttctacctttaactttgtctgtcctggggaagaggaccacttgctacttgaccgtggtgagttgcagatgagatgatgccgtgaggaggctatgaatgatgcctccgtttgtttcagttcattcagtgaacgtctatgttctcagtctcctcattgataggagatggcgtctcaatgggaggcaaagtgttccatgggccccctcaggccaacttccctgccatggcctggagtcaaagagggcaaagattgaggaggagccctcaggctgtgccagacttggattagagagagctggactccctgaagcagggcttggcagcttgcctttaaagagaaagggggttggaagtagggatgctttctcctggtcgtgtcaaaagagatcagtgaggctttgcagctatgagatagcggtccacgtgcaacttgaagtaagctaggaattcacatgaagtccagttcagatcctccttgcaggaaagtcttagagggtaaaggaatgtttctcttgaaatagagcaagctaaagcggactggatacgaaaggctgagctctcccagattcccttttggctgtggatgttcacaaggagagagggcaaaggaatgtcatatatgccatgagattaataaggaaaactgagttacgttgcatagcaatctaaacgaagatctgccagttcaactaaaccaagaccgctcataaacaatagaggagcgctgtgcccttctgccaaggatgggagaggtgtggttctttttgagtagtggctttgttgccacaccatgcatcttcttgttaatgtgtaactgcctttgtttgcccattggggatcactttctgctaaagctgaaggactccatgctgactcttatttagtccccagttccttagtgttggccttctctaactcatcttttgttgtgatggagccttgagtacccttctgagtaagaataatgactgagcttaagtcaaatgccatgtaaggcaggacctctctgcaaactgggttttgctctgtctcctttcaggcacttctggatccagctgtttggtagctgcactaggaaacacatggggtcactgtgtgaacacccggctgattctccagtaccttgattcagagagaaggcaggtgagtgaatgctctcccagagttcttcaagtgtaaaggtaagagaaaaagatgaactggaaatcagagcatctgaaggtggtcgccaccatatctgtcctgggcaagaactgactgaccgtaaggaaaactctcttgtcctaagagcaactaaaataaaacaggtggggggttgggaggtgggggtggggattgaagtgggggtaagagtggagaggtaggctgcagggggaggggagttggccatatcacaggaaaacagtttgagagtgagtcctgcggttagcatttcctcaacatctgtgaatgactggggaccactcttggagatgagggatttaaattcctcatctccaagtgattattctgttaggtatgtgttcaagactagctaatttgtgagcaaattaaatagttgccataccttttcttgccgtgtgtgtgtgtgtgtgtgtgtgtgtgtgtgtgtgtgtgtgtgtgtgtgtgtgtgtgtgttttgagaccttaaggtggacaccttctacttagtgctaagcccagtgtgtagctttcacgttgccacatacgctaggggttttaagaactaagtatcatcagaggatgctctgaaagcataatgacttcctcaggtccccctgtttagacttctggcctcaagagagaatccctctattcagaaagtaatactgtccaccccctacttaatcttctctcccaactccagagaaaggaaccctagagcctgatctttttaaaactcacaaaggttgtatctcctgatgccctgcctcacctttatcccactttttgaccagactgagttggcatcgctcaggaaatctggcaaagggaaaggattgggtgaataccctgatgttttgagtggagaagaattcacatgccagatttgccagctaaatacacagcaaatccaggttaatgaagaagggggtgggactggtgggcctttccaggggagatggggcaggatggtattgcttttacagcaggagataaattgactcttgtagcaaggagccagggatcatcaaatacagacatgggcatttatttgccttttccagacaactttatggatgtccttggttacagaccagaggattcttcttgattttcttgggcttgtgtaaacaacatttcagcctggacactaggtcagccctgttccgagaagataaagctgcttattccatccaaggaagcattcttgtgttttcaagccctagcatgcctgttactcagggacacctttccactgtggttccggtatcctggttctgaggccaacacttttcttgatggaatacatccagacgatttctggagaacctaatgaccattggtgtgtcccttagatggatgagtgtcagtggaaaagcagtgtgtagctagctatccgaaaagcactgaaaagagcaacattctttgtgaatcggtgtgggcagaggtctctgtgaccaccagggctggcagagtaacagtcctcgtgaggtcagaaggaaatccagttaacatgacttagctggtgttggttcaaactacaaaagtctgacaccaagcagtttattttagacacatttaagtacaataaaactttgggaataagtttcctggtaaaggttatctcaatcctgtgtgcaaggtaaagcttaaggcaggactacatcaaaagtcttttttgcaaagcacacgtgacctcttctattgattaagggcctaggatccggtgtggtcttggtcgtatagataaggtagaggtcagcaggctatatagtacttgtgacatccgtaaggatggattctattgactgagagacaaagttgaagataaagttctaaggaggaagagtctggaataaacaatctaggggattcgggcgaggcctggccctatagatagcaaaggtcaccaggttattaactgtatatcccctcctggccctctggtatacagaacaggtatacatcccttccactaaagagacaagcctgtgtagttaacattgctggtttccttagtgcttatctgtgagtacagggacctttgtgttctcaatgtcagtcttggttctttcacttcatggaccctacttcttgaaaacccatagtatctctgccttcgatttgagatggctttcttcctgaaacatactgattctgtgatctttcacatacagcaccatggaatccaggcatccagattctagtttttctaattctagataaaatttataaataaataaagttaaaaccatatttttttggtctctttataacacgttcacccatgtctattttgtcagaaccaacagaaagtacttgacagaaccaatgttatttttttgtatctttggtgacttgaggatttgggtggctcttgactgttagggtcaaacacaggccattgattacacgaagagcacaggaacaaagtgtggatggatcagtgaccatctatgaactcatatcccattagatgggccattggtatgatctacaaagggaaatgtgttgccctggttactaatgagtcagcaacaaacttgaatgccttcgagtcttcttttcaaacaataacaaacaattaataaaaatatgactgaactaccaatccagacaagataacacacattttaatttctcagaagaaatatactgttaaatgtgtgacctaatacctaggattataatacctataataacgcatctcggtctgatgaccttatcttgtccgagcagatagtgcgcctagtgattcacttgctctttcctgtggtcttagttcatgacaacacagggaagccatacgaagataagactttttggtgatatgggtaacaaaacaatcctttcaagttagtctagaaataccttcttatggtgcttctcagcaggagagcacgtagggccatttcaggatagtcagtacttctgagacaccaactcgaaggcggcaggtatcgcttgtgtgtcttggtttgtgttttgctttcaatctgcaaacagagaccactctaccaagggatcaaacttatagaatgaggattatgtttttatcctgccccagggcttctgaatctaaggcctaagctgggatcatggggccagcagggatcaggccaagctgagcagcctaggagtaaagtgtaaagtaaaggaggaagcagccccccttggctgattattttcttttcttttcttttcttttcttttcttttcttttttttttttttttttttttttttgattattttctttacacccaggaaacgttgtaaaattatataactaagaaagaaatctccttatcagggcacaagccaagttcagcctcttgtttattctgcttccgtgtttgcaaaaaccttcttaagaagctgtaatatgctttcttttgagttaattcggggctctttctcacttggctttcatttgcaccttccctgtgctgcttcagccctgctgtagtcgtttcgcagtatttttcttctaactgaagacatggctttcgagcagaatgaaggtgacctctactaggctttatgcttatccttgacctttaaaaatcatccaaaaatatgtgtgagctcatccaagtgcatggcttagaggtgccaggaggaaggaggcatagttctgaaccagagcaccttccagtcaaggaggggagatttcgtgcatgcacatgcatgcactcatggataatcaacagggaagccagagtaagggatactgaagtgccaccacaggatggtgtctgggtaactcctgcatggatggctaaaacactgtgaatctaaagaaaggtgaaatcatcaggggcgtcctagaaagcactaggaaaggctggggggacctgagtacttccagccagaagttctcaagcctggctgcactgcagcttcagtacaagatcctttatgaaatgcccaatgccagagctccatgctgactactgactagctaagcaaagcctctgcctggggaagggggaacaggagagcacacataagcatcagcacataagcatcagcatccgtttcatgctcacccaggtgattttaatgaactagccaggttaagagctcgcgctttaaataaggataggcagaaagggaagatgtcaggatggtgcccagcacagaaaaacagctggaaggtggtcacatgatggtacagggtggattctgccttatcactgagtagagggttcctctcagcatttgtctgacaattttttttactgaatcaccccctgtctactcattatggcagaagatactagaatcaaagaatgaagaaatgtagccgatcccctctgattgctcagtttgcttggaaagacaaccatgaaaatggtatgttctataagagtatcaataattagtaaatgcaaagtcgatagaaggctctgccactggtaaaggttctgggaggattaaagaggctgaagagtggctcaacagttaagagcactgactactactcttcaagaggtcttgagttcaattcccagcaaccacatggtggttcacaaccatctgtaatggggtctgatgccctttctggtgtgtctaaagacagctacagcatacttatgtacataaaataaataaacaaatcttgaaaattaaaataaaaaggaggcagcaatatacacagtgacttggccaagactaacatttgagaagtttttgaagcatcgggttccctgtggtgactcagaaagttggagcgtaggtggctgtgcttgaaatgatgcaaaacctgatggaaccttcagagtattttccatcaaatcctcatgaagcctgttcctacaaaccacatatggcattatataaattttgaagtgcccaagaaggagtaatgaaacaaattaatcctggctaagcctcacaccctcttgacgaaataaatattatgactctcctatttcaacagattgggaggaagtagtcatttcatataggcagtttatttgaatagactttataacggtattttcatcttctgctcgggaggcaccctaaagttattgaacacttgagggatgagcccatatgttgataagaccaatactgtagactcaagtcccaatcctgatttggatctgtggctttcctcagtgccataggttgttggcggtcctggacttgagtagccagtgtttcctttctgatgatggagttttctcagaatccattttatacttgtcaaaggcccagtctttgtcactgcgaagacataagccttcattgacacccccctcccccacttccctctggattacagttgtatggacacttaggtctcttcttgtactcacaagccccaaattaggagctcagtgaagatgtagcttcagagctgaggacgttgtgtgacatacatgtaaggtcttggttctgatggaaggtgaaaaggaaagaggtggacaaatccttcttagtgtgctaaggtgacaggaggcaagtcccaggcaatcgtcataaaacaaatgatgagaaggaaacattttttttattaatacatgaacccagccttgagttactcttccccatactgaatgtcgcagtttagtagttccttagagccccagtagtcagctaaaaagttccacttcagattactactgcgagcagacatctgcatagcagtgtaatgggactattgaccacaaagacagttcagaagcaatttgctgggatctatggaagaactggagccagtctactagaataaccaagccagagccctaaacatggcccatgtcacatgagagagccacctttaggggcaggtggcttgagtacttgagggtacacaaaagtccttaaggtagaattggccacaatatgaggtgtatgcctgtgttcactcacagacattaaatgatgttaggttgatgtaagccacagtcagacacagttttgtgtctccttgctttcagatctctctgaagatttctgctccagagagatcatacttagttaagccttaacacaaacataaactgttctcacagacagcttctaggtaatcataccatctcgctcgcttttcaccccagcacatctgcttgtctgctctgtgtaggtaaagagagagagcaggggagaagtggggggtggggaagagtgatcacagatcacatatgcaaaagagagtttggccatgcgactgggtgggaggaccttcttttaagcagaaatgtctgtagaaacagccaagggaacatggaattccagccaagtgcattgccttgagtatgaacgttgcctcccttttcagactgctcaagtgtgaaatctgaacttttgcccatactcctcaatcagaaatgctcttaaacaggtattgtacagatttggaaaatggtggcttttaaagacttgggcttgctttctttttctttctttctttctttctttctttctttctttctttctttctttctttctttctttctttctttctttcttcagaccaccaggtaagtaggaaggtaagtaaggaggtaggtaggagggcaagtaagtagataaggaaaaatctgaggaaattctacttgaaaggatgctatgaccacggttatgttgagttggtgtcatagagcatatacacgggtctaatagagaaaaggacaacactgttaccaagtcaacaacccctatgactatctccacacttaagaaatacacacacacctgaaatggttccttggaaaaaagccagtggctaggggctggaggggtggctcagttgttaagagcactgtctgctcttcctgaggatccaagtttggttcccagcacctgcatggcagcttacaacaatctgtatatccagttacaaggatccagcaccctcttctggcctctacagtcactgcatgaatgtggagcacaaacatacattcaagcaaaacacacatatatcatcatcatcatcataataataataataataataacaacatttttatcaagaaaaaatcagtatgcctgctatcaccatttcttaatggatcccaggaaagggagctgtctcttaaggccttgggcacattcagttaaaaacacaggtgcagttggtgcctggcccttccgttgaaggccctttattctaactttcagctatgacagatcatggactccaagagtggatctttcctaggagattctgagcactttagagactttaaaagtctaaataaaaatgaaagcttttttttttttttgtcaaagtagagttgtaaaattagttgttaccaccatctcaaaaaataaaaaaaccctgaaacaccgaaaaagtgtaggaaacatatgtgtggataaagaatatatttattagtgtgttaaaccatatgcccttatttttgtagcaggcttattcctgcttacatgtccttcgttctctccttgaggatcctggtctccagccatcaggagcctagtgctgggtctacgcagagttctgaaggctggacctagggaatatgcctctctctccatccctctccagctcggaggagttttatttttacatgctattgtctggttccaagtcccctggtgcagtgaccctcccagctctaacttgcaaaggaaaggaggccaaatagccgggtgagatttttttttccagagaaatctaagcagttacaggaagtaaaagagacacagggctttggaaccaaactgaagaccctgtttgtctagctttaaaaaaaaaaatgcttgctttcagttgggaagcaacataggaaaacagctatgcgctttcttggacaaggcccgtggccgagtcaaggacactgacatgtttggctcatttgagaatgaaggtaggggaggatgcgacattctttagttatgggtgaagaaaccgtgggggaggcaaagggaaagaaggctttcatatcttcatcaactatgagttggttggcatttgaatctgcatttccactagaatgtgacagtgtctcatttaaaatccctcctggtttatccagtgtccctgactacagtgagtcactgaataagctaaggtgcctgtaacccaggaggccctgggccctctccccactgatggagttgcttaaggcataccggaggaagggtctgaagcttttaggaacctgttggtgactctcgcaacagcaactcttagactcatgctctcttctaacctcctaactaacctacagttgggcaagtcactggggttaagtgatacacagtcctgaagctggcaagcaatgggcttggaattagaattcacttcatctcactcctgacatgttgtcatttttcactgttcctgatgaatctctaagatagattctgagtttcaaaaaagtccccaaacacagccaaattcttaggctaataggtgatgtgctatttatatctcctatgactttcagtagttcattaaaaaaaaaaaaattctacagaactctgcaaaaaaagtattcttacaaacaccttcccactctacctacattgcaatgagttataaaagtcagtctttgacccttgggcccagagaggagactcggaatctttttcttacttaaacatcacagtggagcgattccctgtggaggatctgtgctcacagacaatctcctgtaacgtcaattgtgctccctggaaggacactcttcagccccaggcttcctgttgcctgccttcacaggttaaaggcattcagtccttttcctggacttttttcttggtgcttccaatgtggaagatgctttgtgcttatctcatttttgagtcttacatgttccctgcaaaaaggccttacagggcaggaggcagcagaaagcaggaggcattctgtgtaggggcccattttctgccatgtcgggcagggcctcatgcttggtcccagagttctgggcagaactgaaagcgtcttctaggaggggaagagttaagcctgggacagaacccataacgttgcagccttcaagtctgactctttcaagtgcacgattgccagtcatcaccacaatagtccttcaacacaggcattaacatccccagtcttagcaagcaaagctgggctggtaagataaagaaagatattcaatggtaactccaaaatgtagacgggtttgtaccgctccggagcccaggtaacacgtcatctgaggtttaagaggttttgttggtattactatcgttacatttttaagtgtgggaattagatgagggactggaaagtgacatttgtctcacagttaatgtctcttattctgattctctctttctctgtctgtacccccacaacaccccccccccattccctcactgcttcatgcttagttttcctgaaagacagctggatctagaatgtcatttaacttaccttcaaagagtcaccactcaggaacaaggacacgaagggatgatagtctgatgttttcttcccttgttctgagtgttgttttgctttaaaaatactcccgacagtggccggtgaagaagtgctcagttctctctgggtgtgtgactccaaacaccttgttgcacatgacactgaagcaggcccaggtcatagtactacagtctgggtgctgttgccagggagaatctatacagtgcactttcaggctacctgggcctatggtctctgctgtttcccagaaggagctgtggctgagagtacagagtcgggtacagtgctaatttgcatttctcatccttcctgaggtccctgactggagcactgggtagagtgaggctcttccagcatccaaacagcttacaaagttaggagcagggactggatgcagacaagggagttacatgatgggtgtgtgagggtaaatggatatgtctctggcattcgattcaaatttctgaagtcttatgttactgtaacattttatgatacgctacacattatcaaatgcatgattggttgtcagaagcaatataagtcattgggctttcgtgatttctgctgcttcatctaatttggagttttcggttgacatactcctttctcccctcagccttcttcccctgttgcccctctccctgtctctagccttctctagagcaggcaatggctctgacaactgtcttggttaaaatgcttgaaacagaggcttttcatctttgggtctccttctggaagtttcccttctgggcttggcagagctttagagtcttggcattttggacaaagactttgtgtgcttgagtcttggactcctgctttattgttaccaaagggactgtgattttgagaacacctttggtagccacgctgtggtgcctgcgtccccatgcctactgtctaaagcttcttttcagaactggcagtaaagaccctgggttggaaagttgacgcaaccctccccaacagagctcttcactgcccactggaagcacagatgagatgcatcttcacagagctcataaaacagaaccgggcgaggtcctgggtgtagttgggagggaccaggagctgtctacccaaggcccccacagtcctggctttggggttagtttcctttgttatcccagctatttactgggtttcttttgggccagttactcttctaagttctttgtgggcattctcttgtttcaacctcgtaataactctatggggtaggcatttctaggtatgatttataggtgaatacaccgaggtttatagagctttaaattttcgctctaaatcgcatggcttctggcccagaatttttcttctcctttgtgccatatccagttatacatatgtgctccctcatctacacctctgggtgtttaaccttcatcctatattatatcccatgttaatgtaaggttttcatgcatacacttggaatcagttcctctgctcaacccctgggggtaactacctgaagtggttatattaaatagaatgtttccttcaaagaatgggatgagctttaccttaaaaaggctattttgatctccatcaagcttagatatttcctatgactctgtggctcagtgtgccatcagaacagttctgcgagagaatgagctcttgcatcttgctgaatcgtaccatccctcagagaaatctctgctcttttctttcagcttccaaaccatggtcttgccagcagcatctttccatggaccggcttctgcattcattttgtgtccttcattgtcagtgaagaaagagagggtacctctgtggagatttgctcacctttagagcagtcttttactcatccgcccaggatgttctccagtgagaatgggcagggtctgtagcagaccccataaatgcatcccttccttcatgggtggtacataatgacttaaattatatctgacccctcacttttcccttaaaatgtcattttcccacataggaggcaacttcatggtttacctttgagtcctgagttgtctgttctctgaaagtaccgttcctgccctctcctaaagatctgatcagtgtcttatgaaacgagacgactggccatcctgtggtctttcactggtactcctttggaaggagaaggcttaatagattcaacatggcctccaacctttcaacagctgttcttataccatgtgttccctttaattagtagccacttattcaatgttctctctagatatactgccctacattgggcagttctgtgggctgttaggctcttccttgtaactgatcttgatttcctactgtgactccattctggcactgcccttcctttgtatgccatcccacccctgctctgagatccttgggactggctcggctgacagccatcagcatttcatcccattgatttgagaaagccagttctctgaagcaccattcataaccttactctcagtggaagagcagtccctgggactcctccacagcaaggctcttgctacatggtataattgtccagaggccaagtatttcctaagtaaatccatagatgagttggatgagcatctgccatagcacgggtaagaccttgttccctttttgctcatatattaaaatgtgatttttagcccctcagctaaaaacaaaagtgtgtgctacagtttgaatgtgctccttcccaagcatgtcttggaaagttgatggttgttgtaactgtgttgagagatggaacaggggcatggtagggagatagctcagtaggtaagagcactagacatgaaagcccaagaacccaggttgtcaccggagctcgcataaaaatccagatgcagatatttgcatctacaattccagcattctaatagcaagatgaaaacaggattacccccaaagctcaaaggctggcctgcctggagtattcagtaccatcacgacaccagagagactgcctccagggagtggaagatgagaaccagcccgggacagttgtcttcatggcgtgtgcacacacatcacttattaactcattaattttattttaaagataagcaatttaagaggtggctgtgccgtaaggttttatgacaaggctaatgtctttatggtaggagtgtgacttgggcccccttttatttctttctcacccttctctttttttacttccattatgtgattatgcaagaaagagtcactagattcaggcattctatctcagatgtctgaggccctagaactgaaatacatgtctgtatattactaatcacccagtctgtggtattcagatatagcaataaagaacagtctaagatggtatataatacatgtaaagcctttagttacaaaatttactaaaatgttagtatttgttgtaatagtcctttgtgtgtatctagccgtaagcacaggtcctctcctaattcttctgcctttagttaggtaaaccctttaactgttagaaccctgttatttcctgttacaaccctggcttctgaatgggcagccatcagaatgaaatgcttggtggtgcccacttgggcgagggaaaagaacaggctttgcagtagacccctgctttcttgaggaaggagggggtctcctatggatagccccgcctccttccccagataattctggcaaatttaaggtcaatgggtacaataagcagtgactctgaaggactttcagcttcaagggtttttgtaaaacaccccctacaacttggcaatcaggaacctgccttgtgcatccctccagtaagtagcctatctcctctcagacacattctctgcccttcctagctcagcttgatgtcacaagagaactgacccctacagttcatatctccagggctcccttcctcttcattctggataagaataaagaagctgtgtgttttcccagaaccctgacccccattccccgcctccagccccatctcctccggcagttgtattggttccatgtctctggtccctttgttgtccaagatccaatgggtcaaaacttcttcagcctttgggctccagcagcaatgggagttcttttcctccagccctaggatagaggcagcttcttttcattgctattctcttttcctttcagcccttcctcagcatgcgttaactaattccaaaaattaaatctctctcttgaatctcctggggaaatccctgtttctctgacatagactgatatgggtctaaagtgttctctcttgataaatggtttgtgtaaagctcaagatatgttctttattacccagttccccaaagcactcctctcatctccagtggttctctagccagacgagtcagactcctgagctggctgtcttagagggcaaagattctgtgcagcgcttcctgaatagcatgggaaaaggagctctttttggcctcatctccttcctgtaggattttccaaaactttccagatgtatctaagttcaggaaacattttaatgactggaaatagtgtcttgtgggggcttaaaactaacagggcctcctgtgaaaagggtctgttgaagcatttcagggagctgcatgcacaggtcctacctctgccctccccttggtaaagcatggcaggctctcatcctttagtggattcattgttgggagggattgacatcctctaaatgccctgatcatatgacaaacaattccacagtgttctttgttggaggaagggatcgtcaaatagtcattgatttggattctaactcaggggcaatctcttattctatgaggagacctgtatattaaactggggtggggggagctatttgccccatattagtgactataagattggcctaaatcataataagtactttctaaagccacagttactaactcagtgaatttgagccctcaggttctattcacaggacccatagagtcacccacaaccatatataactcgagttccagaatatccaacgccctcttctggcttccacagacactatatacatgtggtgcacagccacgcatgaagacagaacacccatacccatgaaaataaataatttctctaatatttttccaaattataaacaagaaaatcaccattcttctctggtggcaaaaaaatctcagaaatttccatatttctatctctacaagtaatagataaaaccccatgtctttggaaacaacttgagtcaactttcttattgatttatttggagagttcacatagtctttaataccataaccactgagcaggatactcaacacagttattaaagagcaggccattaatgaaaaggaagcaggtgatatgcacagatggacctgagattcctggtctctgaaatatccagcaatgtgtgtgtgatagtgtaaccatatataactccagtttcaaagcatcccacgccctcttctggcctccacaggtactgcatacatgtggtgcacaggcatgtttttccaaattataaacaaggaaatcaccatgcacttgagtgcactgccacactttacgaagagaagggcggagttaggacctgtgcgtgcaaatccctgaaatccctcgatgaacttttctcaaagcaggccctgttagtttcaagcccaccaccccaagcatagttatggttatatatatcgcttccttcattagtctacaaagaattctacaacatgagtcagccacatatgtagtgcaggagcatggctacatttgagtacactgaacattcgtgtagcctttcacatttcttcaaaaattaagattaattcattaagtataaaaataaaatatacatacaaaagacactgtcttcatctcccatgtggggcggggaggaaaacttttcattgtcaaaaagacaatgatactttaaaatcaattctctctaataagatatctgatcatgttatagaagatggctcttctataacagagagccactgattcttctgaaattttaaaagaggttttatatattatgtgtacatgtatatctgcacgtgggtttatgcatatgtatgcagtgcccacagattccagaagagggcactggatcccctggagaaggagtgacaggcagttgaaagctgtcagtgtgggtctgggagctgaacacaggtcctccccacaagcggtgtgcactcctctccgctgagctgcccttccagtcctggttttctcttctgcactctctgcttctatgaagaagatgagacattgcactctgcccctgctttaggcaataggaacattgtttgttatcttcaggaattgcctcatggcttatctgtgcaaagccatatcatataatcctatagttcagctgtttacttggccagtgacttccttgtgaagtgtttctggacaggtggtcaaaggagcactgcttagactccgcctgcagagcatatgacagttcagctgcctgagccttctaggctgcatccagaaaggatgccctccacctcaaaaaatcggaacttctacattcctgggtgggtcttaggtacacaaaccctgagatcctctgccagccgatagtgtatgtatattctgcgatggaagtggctttagctctgtttgcttcctgtctgcaagccttctcctacctgcaggccttcatcggccctttccatctctccagtgcctcctcattacataatacaaagctagagtagtcgtctctgaggggcctttgggttctagtggtctgtgaaattcgttctctagtgacctttaagagttactgaacctatcttaataaatcatatctgagtgctgggtattgtatggatctgtggtgtgtgtgtgtgtgtgtgtgtgtgtgtgcacatgtgcatgtgtgtgtgcgtgcatcattgcatgtgtacacatatatggcacatatgtacctgtgtgtggaggtcagaggtcagttccagatgcccttctcaatcactttccaccttagttttcagacaaggtctctcactgaacctggaactcactgactggctagtagctctacagacttccacctttgtttcccagaccctgtaatcttaggtacacagtgctgcctgtgccagcttgttacatctgggctgcagatatgaacttgggtcctcatgcttccgcagtgagctcttcacccactgaaccacatccccagaccccataacttttatccttacccttgtcaccatcatcacctccacttccttctcttcctcctcttcctcctcctcttgtgctcaagatcaaactcggggctttatgtgagcattcaccatcatggagctgtaccttttcctccgcatctttagtaacacgtgctgttcttggtagaagtcacacttgagatcagactgaggctcagaaaagtaaagcaacttgtctaacttcacttagtatgtagagctgtagtgaggtcagatcaaagcagggccataaacaggtaaagaactgcctgtgttgggttgacccagagctgcccaaggcctgggactcacccagtgaactgctcactcaacgccggctcctctccagcagaggaacctggttttggttttcccagatgtttacttggcctcttgcttgagcctttgcctttcctactcaatagcaatgaaaggacaaaaaaaaaaaaaaaaaaaaagaaagaaaagaaaaaaaaaaaaaagcccaaggctggaaacattttgtttcctacaaaaagaatacattttgcagccagctctgtggtggaaagcgtttttttttcctgtggtctaagggatgggctggatcccatctctccttggctagtgactgagaactcagcctgtggcttcccagcaagtctgtgcaaagcacgcagtttttcaaaggagtgtttaatggtgttgggtacgtgcacgggtggacagattagtctgtttgggtgtctaagagcatcttcacgagcctctggatgtctcggggcagagagaaccagggagtggttttccacatgccggacgcaccagcatagcctttaagttttcaccacttggtgacgggcagacactcagagaccgacagaatgagaggagagagatacacgaaccttgtatggatttgcaagtaatcagaatgctagggactgtggaattttgacctgtcgcatttctttctgttttcaaatgctcagatccaaaacatggcataggtttttttattagatggcagggtggtcacaaagtgggaattctgaggaatcagtctccactgtggccaaatttagggttcggtacagtaatttctgccaaaattttagataaatcactttgtaaagatagattacatttccatgtcaaaaaaaatttttttacttaaaattgatttttaagttctgtgcttctaaaaacaaatgtgcttttaatgggatggagtttgagcatcctagaaatccacagatattcataatttaccctttattgataattttatgatctgattgagactttgcagtatgtggtctttcatagaacttttcagcgctgaccctatggcctagccttagagattctgtacccaacattcttgtcaaccaccaccaaaaaaagtacagtcctctggctcccattgcctctggctcccattgcctctggctcttaagcagaattccagctcagtgcttgacacagactacatgtccaataaacattggttggcttagatgaaataaacttctccagagttgacaagctgctatctgtaacttcagaattccaagtagagacacatttggagtacaaaacatctcgctttttagaagggacagttgtagccaccgagtctggggtaaccatttgaagaaacaagtatcactgatagatagagctgtgaacccctctgctatactctgaggtagaaaacacatttgaaccataggacgatttccctttagagacaaattgagatagacccatgcctctcgtgggaccctggcataggatccaagtatgtgcacttggacatagaaactggcccatccaagtcaggctcataggaaagactgaccacaaagaaatcagaccacagctaaccagtggggaaaactggcattttttcccattttatcacacaaggcaataggcccgttctcacagtaaggggtagggtaacttgggaggatagtggtagtggttttagtacactggcttacagatggggttggtatttctatctttactcttgacaatgagacaacagcccaaataatagatcccttggtatatcagaatgccagggctaactgggctggtagagctttgtggctttggctcttggctgacaggcgtatccatgcattagggccatggcttggcagtagacaaagcagctgtgtgggtcctgggagagctctctggctctgtgggtttctttgatacgcaattgaactttggctaatttctcttctcatggctgtttatgaagtccagagctgggcaaagaactccttctggagctcagaggcatagcaaaggcgggcaatggtgtgttcccactggcatactctacttgtagcctcagaggatggtccacaaggcctaccacaaagggacaagttggggccagagactacagagttctcttttcagtaacatactgctctacctagaagactgggtagatagatccctttaaaattcccctccttcagagggaatggatctctcatttggaaaagatcaataagctgattaaattagtgttctctagtgccataatgcttaacaacaatagctaatgggtactgagtatttagacatttgtgaggtactacagtgacgtagataacccatctaacctaaccaccacaccttgtaaggtaagtaccgtcacccccacctccctgtctcatacataaagaatttcagtggcagaattgttagtgattgtggttcttatcactccccaactttaggctcaaattctataaatatgtctaaataaatgaagttagccttcttaattacccactttaagttataatgggctgtcttagttaggattaaattgctgtgaagagacactatgaccaaggcaactcttataaaggacaacattcaaggcaggcagtgagcatgcaggcagagataataccagaggagctgagagttctacatcttgttccaaaggcagttagtttggaggaaggtctcaaagcccacccccacagtgacacacttcctccaacaaggccatacctcctaatagtgccactccctgggccaaacatattcaagccaccatacgggcctaggccattttcagacaatatcaaatacacctgaaattgtgacatcccttgactcatagacaagggtagagaaggtgcttggcttctctgaaactgggatcatccgttctatcaagtgcatagagcagacagagacagatgccatgttagactggggagtaacctgtgggccacgacccccttggcaaacctgtctccaaaaaacttacattatgattcatagcagtagcaaaattacagttatgaagtagcaacaaaaataattttatggtgtggtggggagggtcaccatagcatgtatgtatttaagggttgcagcattagggaggttgagaaccaccaggctagagaattggagagaaggatggtgcccaagtgtagaaactctagagcatctggcatcagaatcagagagcactgcaactttcttccccgtcatttctactctaacctttgtgctttccattgctgtccccaagaaacagtggcttcaacaataacatctgccaattttgcctcagacagggagggtttgtgggagcatcacccctataatatactatgagatggtttttctcaatagcactggcaagtgtgcaccatggccctcggcttacagatggggaactaggcttggaaatgaagacgtgtcctaaagcacaagcaacgtataaatggtagaaagggaggcagacctccccccgcccccagggacgagcacctggcctttgtcttgcccttgacctctctcaccctttcttttaatgcttgtaccgcagttctcctgtaagcaaacacccttctttaatcttcaacctgtgtgtccaggcagggctgcttgaaccactagctccacgtccaaccagccgaaggatcatattccctttctacggagattggtttgcagtaattggtgagcgcagactaagccaattaaagtaaacccaagacttagctggaacaaggatggctaagctggtagaatgcgggcagggagctcctgggggccatctttgccatggtgtggaaggaagccaccttaagagagacaaagaagccgatccataaagaaaggagagatacggagagactgctccctggagagacgagttgtgcacatcctccctgaccccgacccctgcactggatctgaaaatgttatcattgaactgtggatcctgtcctcccactgggcaaagacaggctctgattctccaggtctgtctttttctagactgggccgtttcttcactctcccctccttgtgcatttgttcttccggcctctctgttgaccttttctctgctccccaaccacagtaccgaagggaaaagccagaaacctaactcaggcagccgtgttggctctcagaaaaggttcagatgaagagtgaattaaacacactgacttaggctgaagagaaggcctgtcgtgctcttgccgagggtccagttcccatttaggcaaaactcgtacacatacattttttaagtaagtaaatagactatttaaaaaaaaaaaaaagtactgacttaaaagcaatttaaaagtcatcctggaattttagttagctattctgaccgtggcttctttgtcgaatatgaaacttgatgtcattgcttccactgctgaaatacagccttttctgcgttggtctcacttaatcatcaatgaatgatggggtgtaaaatagtctttccagttcaaaagtagcatcaagtaaataagatgaaactactaatggtttgggaaatgaggtcatacagcaagtcgatacttagcagccatctaccaagctaggttatggaaaagccaaagatgaatgcaatatcatgtttaaaagtctggccagagtaagtctcagaaccactgaccataatacagtgtgacgagcaggagggtagtgggggcatgagggcccacataggagggggcagacagcagatgccaggacgtggagaaagaaggatgggtgtgggtatcaccccaaacacacacactattattgaattgtctaggatggctctagggccggggtttgccgtggggcatttatagacttacttagaggtagcagctatttgccagatgacatggcagaatttcagtattataactagagtgactgacctcatacagtcaagcaagagcccccaaaattgtgctggagtcaagatcttctaaaacagatggcagaactcttgtcctgcctgaggctgagcacagcttcagagaagggctctagcagaccacgttcagagttcagagagaacaaaccgcccaagcaaaggcagccgtctctgtgtttaacccacaggatcagatgtaggaatgatcaggttgggggtgggggggctggagcaacaagccagcccatgggggagggaggctgctgaagatgtgaaaaatcactgctggggagccagcgatgcccaacaaaatgttaaaacatgataatcaggctgggcaggcaggcaggcctggtggtgcacttggaaggcagaagcaggcagatctctgtgagtttaaggccggtctggtccacatagagagttcgaggacagccagggctgcatagagagagcctgccacaaatcaaacaacaacaaaaacaaaaacaaaaagcttggcgcccaccaacttctgtttctctgtgagggccctgctcgtgtgaccttgatttatttagatatagagtccatccatgctccaggacgtttttttgacccgttgtccacattaatctgaaaaggccagaaatacaggcatatgagccactaaatccctagactgctgctcgccctgtgcaaggcagcaagaagccagtgttttttaaagcacgagtcatctctggattcccaaggccttctgggttacttcaaagcagggccttttggctgcttatagtcagaggcagcatcatattcgtctttgttttccccactgtctagctcagtacctgggacataggaggtactcaataaatatttgttgaatgaatataacatgaaataagtcattcagttctaagtaaccattgcttatacttcttgtaaatatgggtttatataattgcaaagtgtgtctgccctttttaggtcttgtattctcattgtggcctgagagctgtcaggggtgctctgctagagtctgcctgctccacgggaaagctctggcaagtgcaaattgaatatccccgcttgaggactgaccgaatatggcagagttcttactcccttcaacttgatcttccctacctgaggaagggagaggaggcttttgtttatgtgttctgaaatgaggaacaaaatttaatgtatatggggtgtatggagagaatcaggcaatacagaataatatggagcaaaaggaaaaaatccgccccctagatatgtaatacaggctttctctgcactaactatatatataatgttatgtggcctgcttggaaagtaatctggttattgtagattctctcccactgtgtgtgtgtgtgtgtgtgtgtgtgtgtgtgtgtgtgtgtgtgtgtgtgtgtgtgtctgagtgtatttacttatcacttttcacagaaacatggtattcgataatattagttagtgtataagcatgcagtccaaagcattatggcattaaaatgaaattctgtgttctttaaactcatgccaggaaaacatgaagtagttgatttttaattgccaaacatcattgttgtcatcgtcatcaccagactagggttctagcttgagtggtagagtgcttgcctagtgcacacgaagcagtagatacaagccccagcactgcatagactgactagatagacttggtggtacacacctataatgtccgaagttcaaatccatcctcatctacacagaaaatctgaagccagtctgtgctacaagaaagcctgtctcaaacaagtgaggaatacataccagcattgacagcaaaatgtgtattataagaacaggcgtgatatagcttcacttcagaaatcgctctgcttcatctaagcccttcacctcagaacactggttaaagcttactgtgattttatcagcggctctgtaacaggtgttatgaaccaatttgaactgaaccaatctttaaatatacttactgtttcaagtgtctcttagtcgggcctactttaattgatcctctctcacacaacagatttttttgaagagagatgaggctatggtgtggagctcatcggtagagttcttgcccagggtattcatggcactaaattacattcacagtaccacacatatctacaaattaaatgtagatataataataaagaggggatagttcaggaaactacaaatgaccaaagacatacaaactcagaacaatgaagtgcttaaagcctgtttgcatccctggttcctaccccaatctgtcccaggctcaggatcaagcccactcatcctgtgctgatgaaagacattgcacagttgatcctcaagaaggctaagattttccagcacgatttcgcttttgttgacattccattgtcgtctttgggatcttatatccctcttgggaacactgactgttctgcagggacctgtctacctacctgtgcgtaggagtctggggcatcgatgggggtgttttcaccgactcatcctttctcctattagtgactcttcctggtccctgccattcttgccttggatagagttttgtcccatagcaattaggcagatctctgatttgcttctaaaacatgatttgttgattgggaaagagaaaagtttgggctatttaagataaaggctctaggaaacaaagggggtctttttatcctgtaggcctcgtcttttaggccaagtgctaggttgttaggaggtatgccattccaagaggtaggttccttgcctggaaagataggaccaaggggattatgggctgaaactgacctcagaaagacactccctgccctcaaggccctttaaatattacatcctctggactctccctcactccgaggagctcaagaggcagcgcatacccatactatgatacttgggtcttcagtttcagacatgaagttttcctcacagatttgctgagaaggtgctggtctgctttgttttcccaattctttctattgcttggctccattatcatgagcatgtgctatttatatgagtgccatttccataaaaaggtgtgtgtgtgtgtgtgtgtgtgtgtgtgtgtgtgtgtgtgtttctatagaaggctcttaatgtgataacacaataggaggactttaacccttcccatgcctcctctgagagcggaatcacaaactgcagaaccccacaaaatacctatctacacatcccagccatattcatcttattgtttgtatgtatgtttgtatgtatgtatgtatgtatgtatgtatgtatgtatttttggttttcaagataggatttctctgtgtagccctggctgtcctggaactgtttttagaccaggctagcctcaaactcaaagatctgtctgcctctgcctcaaaggtgtgtgtgtaccaccaacacccaaactcattgtaatcctcaatttcaaggctatatgttccaggccagggaaactgactcaagaaagcatgctctgctggtggtacctgtgaatcaacagggtgggacagctgtgtgcacagcttaaatccaaacataatattctaatgcagagtgctgacatcagagtccgtggggtggggaagattttgactagacgcctcctagcatgcctcaagtcagatcttctgagtggccagtgggatctataaataaatgtcctcggcatggagagtcagtctttccctcttgtttcaacctatgcaaagttcctcattagtaaaatgaggataatactgcttccctgataagagtgatatgaggatcacacacctcagtcctgggcacacaggaagattacttgaagagttaatttacctgtcatctctgtgatcatctgaagtctgccaagagttacagtgttaggagtaagctgccgaatggtaacctggggggctcccagcgtggtaactctgtgtctagtcttttcctgttgcacccctctgagttcttctcaaaggctttctcgtgcacatcccacttccttgaattacttcagcatgggcgcctagttctgtgggaaaaaggtactgtgagttttccataatacttcatggacaagtcaccctgtgcttgtctatagaatgagatttagacacaatcttattaaaattattgaaagtacaaaaatcttaacatgaatttctggttacatgctgactacattggaataaagttctagatctccttatagagaaaaaaatgggttctctctctctctctctctctctctctctctctctctctgtgtgtgtgtgtgtgtgtgtgtgtgtgtgtgtgtgcgcgcgcgcgcccctctgaactctgtctattgtcctttgaccttgtcatcattggaagagggctttagggaaataataagaatgttgtgctaataagagttaatctgaagggcaaccgtattgactcctttaccgtggtcctccaccatcacagcacggccagggatatggtacattacacaagccagtcccacttgaccagctgttcttggatgtgtcaagcccagatctcagcctctttgcacagaaacatgttgccttccttgaatcaattcctgtgagactaaagaatgtcccatgtggcccaagcatgatgtaatagggatgtgtgctttagaactcaagacacaccctctgagttcctggcatctttttactataataatcacacaaccacagctttcctccgtgacccttaacggccagagctgcctcgccttggctgtgttctctagcacgcctggaccggaggatcaagctcttcttcctgtgggcctgtggagagtctggaagggcagacctgcctaactggatgtccagagtgctctgtgtgggcagctaactgatgctcttgtttttcccgggccttgtctatttggtcagttttgttcacctgctttaagggaaagaaatagtgattttgctcacttgaaatgaaactgtctgccacaggaaatattgtaacaaagtgtaatcaccaaattgagatgagggtgaaatagttcatacttacttgtaagctgaaattagttgtacttccaacctgtgtctttgactctaaagtgtggcccctatagacagtcacaaataggttgaaaatataaagattaaaagttaaataaattttatataaatatataccatatactttataaatatactatataagtatatactatatactttacaaatgtactatatatactatacaaatatatcctatatactttaaaaataaaatttttaaagagagaaagaaaaccatatgtaaatcaataaaaataaactttaagacaaaaaaaaaattctaccagaaacaaaaatggacatgttgttgttaatgtctgagacagggtctcagtgtacagttcaggcttgccttaaattcatgaaccttctgtttgttaaagtcaccaaacctggcctaaaggggaaaaagatacagggtaccgacctaaccaggaagatatttacaatcgatacccaggggcaaagggaaaatcagttttcaccagtggagtctcgctgggtataacaaccaactccaaaacagaccccatgttcaagggtatttgaccaacacaaaactctgtggttttgttttttgtatttttttttgaaagagagagaatataaagttgagtaggtagggaggtgggggaggaccggagaggagctgacggagaagaaaatataatcaaaatatagtgtatgaaaaaaagttgttttaattaaggaaatgttcccctgtcaggaacacttaactattataaacataaatgcatctaaaaactgaacctccaaaataatatctgaaacaagaacaagttcaaagggaaaaggcatctatagattatctatagataattcaatagtaaaattaggagactgccatatcccattttcaattatggattgatcagttgagcagaatttcatcaaagaagcaaaagatttgaagagagctgtgaacttttcagtgtgctcatcggtctctctagaccacttcccgtgggagtggcatactcactttgagtggagcaccctccagtatgatctgtatatgatctgcatatgatctgtctatggggttataatacgggtctcagcacatctgaaagacctgaaatctgaacaaacttctccagttacaatggaatcaagttagtaaccaataacaggcagaaatttcaaaaattctgaattgggtacggacttggaaataaataacaaagcaaaaaatcaatcagaatagaaaatagaaaattgtgaccattgaaatagaatatatactataccaaagcctacatgacatagttgaagtggcattcaaaggaaaatctatagattaaatgtatatagcaacatttattgcatgtaaagtacatcttaataaaacaagttcattttgaaagattaaagatcagctttactgattaagtttatattcaaacacatgtgtatagtcatcatatttttgctgattccattatattgaggaaaaatcactgatactttcaagtcacatatgatgtacactaaaaaaataaaacaaaacccagtgtggctaataagatatatgaacaaaccatactcttataatagttatatgcatgtgaaagtatttaggcaaggatgagctaatgttcacaatttactttgaagtgtaacaaatgcaggtgagttgatagataactaggatgtaaataaaaaaagtgttcattataaagcaacatgattggactataggtattcattaaaaactttctccattttgctgtgtacttaaattttctaataatgaaatattgaggagaaagccgtgaggaaaagctccccctgaccatgtcctataacttactacacaaggatcccattgggctgaggaaactctgttttccttaaggagcacattctcttctagattatactttcataatccaatgttattagaagacactttggaaacaaccactagagagatgccatcaaagaacgtaatagtattctgtggcaatatatgatctcacagcctcaggtgcagaacttctagggggtttgtcctaaaacctaggaaatccctatttcatagagatttaggccagcttactttctatgactaaatgtctatgggagaagtgacgttggccaaatggaaataaattaataaagccaggcttactgagatacggtctattttccaccctgccatttccagcactgtatacttcttgagcccgagcctctctgatgtgaaaagacaacttagatgccattaaactccctgctggctcttctctcatgcctgtggcattgttgctggagcttctgtgttccatggagagtgattttcctagtgacgaagcagattctaatcggggtcagatctagagacacacagcagctgcccccgccgcctttcctgtagtttcttcaacacaatgacagggaattcctacgggaatctctgggtatacttcagatccccctcaacttactacctccttgcagacacagaccttcctgtctgaagcatttccggccctcctgtcccttagcttggaggactttactcaacctggggaagggacaagccttgaggttattaatctcttggattacttgatgccaggccaagcagctttcctcctgggcttccaatcatttgaggaacccttttgctaagtcttcaacaaggaggcaaaaccctggcatgcaagattattgtcagtctcttggcagagctagaggaaagatgtgtttgatttagcaatgggttttattagcccagactgcaaatgaaatgagataataggacctgcattgaaagacatttcggagtccacaggtttctcccgagctccttagtaggaccacacatacagatgaaaggatcagacatatcctgcaagcacatcctggctcaagttatcaacaactacagaatcttgctgatcaatggaaagactaagaaagaattgaaaggctagcaggaaaacgtgggtgagtgtgcaaggtgtcacttctgagctggctctcggttgtttcttaccaccgtttcctcagctgaacacactccattgtcattgtccgacagagagcagaaagccagcccagctagccacctgctcctacgggaagaaaaggttttctgtacactttgactctgccaagccctttactccggccctcaccctcaaccattgtgagctctaggatgtgggcgggaagaggaagaagagaaaagaggaaggtgctcatcaccagggttaaaagcagccttccgggcatgggagctggggaagagaaagtgggagcgctggtgccagcctgcctccgcgcatggctgcctattcaaacttgctttcctaggccacaaagacaaaactcactgtttcctgagactgggctgtattgcaggaactgatggagcctgccaggaccaaatctctccaaaagcaccctccagaatagcctttactcaaaactccaagaccctgctccctattgtgtaccctggccaaccacagaggagggccaggctgggctgctccagatgatagaacgcctgtatcataacatagggcacgggcactattcctggaaggtgtcctcatcctggagaaggactcctgtgcccagcactttccgttccatggctccttttccacttttaagcctcatagaagtagggtcaggccaggaaaaacatatgatgctatagcaatctggaaccaatggcttgactttgggtcctgcccaagcgaagtctcttggcagagactgggaaggtggcctgctcttttctatggcattttccaagacccccgactgggggagaaactacagataagttttttaaatagatacaagtcagagaaggtctggcaggtcatcactttatacatttattctttccatcttttgctccagagaggaacttgttttatatcaagagcattctagaagacgtgggagccaaaagcagctgattgtgatggtggctgccaccaaatgctgtcgatttgtcacctctaatcatgctatggaacagcagtgagggctggagagatggcccagcagttaagggcactggctgttcttccagaggaaccatgtttagttcccatcacccacacagaagcttacaactccagaaagaatccaatttcctcttctgggctctgcaggtactaagcacaccacagtacataaacatacatgcaggcaaaacaccaatacatataaaataaaataaaataaaataaaataaaatttagtatgtgtagtcacacactcacacatttaaagaacagtaaatgaaagcagtttcattctcagagagctgcagagacagcatgtatgcatgccgggttagggagaaatgaccctatgctggggagatgaatactagtttctggaagaggcagcgtttgcaccaagatgaaaggcttaggcattcagagatgaaaggcaatgccagtgtggaagtcacaaaccatgaggccactgcacagatgccctagtcagttctctccgcacctccttttgcccccccccccccatcttgaatcatgcaataaccttactgtagggaggaaatgcctttatttgctagtagttcttttgccttggctggtgttttcaaccccagagaagtggattggtctacatctgtcaaactgggggttgacatttggtgttgcaaatatagactttggaaccctcagaggcagagcccgcttttttttttccccctacaaaggactcagggttttactagtccctaggcctccttgtaggcctatgtgctggagaagatagaggaacctttgatgcacacatgtacacactggaactctccaaacactgaacataggaagcagaggagcccacgttaccagcggtaaagctgtttgcttcagaggatagtttaccctggcgggggtcgggaggtgcacagtggctcagtgggtaaagtacttgctaaggaaacatggctacctaagttcagatccctagtacccatgaaggaaaccaggcatggaagattgtgcctctaaccccagttctcagagacagggtgcagagacaggagagtcctgggggcctgatgaccagccaggagagccaaaacagagagtgccaggtttaattggagatcctatctcaaaaaatatggctgagagcaatactgaagacattaaaagtctagctcgggcctccacactccccccatatgctacacatacacacacatatacgtagatgctagcttttagtttgaatggtaaaaggggacaaagatttaggacattgggtcatgtttcaagaggaaagaatctttgtgtatttacaaaggcatggcagcattccttagtatcttcattgacatttatggggctaagacgtgatttttatattccccccccccccactagtgtgtgtgaaacacatctatgaaaactcagaggctatgtggacttcccctcaacctccagcccttgtgactgcaccgaagggtttgtgatcatgaagtgctttggacttttaaccacctttgtttgctctcctttaggcgtcctcctgttggtcagcttgacatctggattttgttccctatccaaacatgctgtgcattcattaagtgtggtttgctgacacagccccgccctctgaggatgctgagcttacaacctgaacccacactaggtttttgagccacaaatcacagctgatttgtttgaatagcattcctagtctagtttcggaatgccagatctcatctctcctaacctggcaccagtagcaggtactctgatcccaaagagaaggccttacatttattacaatgaaattgtaccctgtgagatatataggattttctggttacctcttaatatataaatctttgacctttagtcaacttgagatttatttgattatcacagttgcctgttctatataaactcctcctcctcttcagatttatttattatattttatgtatatgagtacactatagctgtcttaaagcataccagaagagggcatcaggtctcattacagatggttgtgagccaccatgtggatgctgggaattgaactcgggacctctggaagagcagtcagtgctcttaactgctgagccgtctctccagcccctatgtttgtcttctgttacctcttcaagtcagcatcccttgggtatgttcagttatgtaatcctcagccttttcagtgagcttgtgcccttctatcagccttttcagtgagcttgtgcccttctatttaaagccaagctcttctctaatcacaactcctgccctatcctcttttctgcttcctccttcatagattgcctagcatactgcagccactggtcattaccttagaatgtaaggtgtgttgaaacagaggggattattgtcactttcttccctattgggctccatgtttattatagggtatgaccagatacagccacatcctcactggcctcagtaaaaatgctgaacatgacgaggccaaggttagatgggggggggggcacctgctggaggttgctgcccctcatagattgctaaggactatttgatcactcacaaccccacttaatgctaccagcatccagccttacccatctttactttatccaataggatatcaagaaagttgatcacatttttttttggctataattagatattttgtgttggagatacccctctcatctatcaatcaggaaggtctcctccctgaaaggacatgggctccatctgatatggttttctcactacctctcactgactgcacacagattttgcttcaagacagagcattttaatcagtagcctgtccaaaccccatgactaccttcaaggaagtccttctagatacagtgtccctgggctcatgctcaggaccttgtttgtgggatggtagacaatgtcaccaggagtcagacagcttagattcaaaggcacggcttcttcaagtactaaaacattctacttttttctagttctcaacacagaggctgagacaggtagttctgtcctgagaggccaggtgacctgggtatgagggaggcactgatgctctctcagaccacccttaccacacatggcttcagcagcaggagcagcaggagcagcagcagcatctgtgtgggtggaacaggttcctgcccttgggaaggaggacaggaagagaccaggatattcagcttcttatggaaacataagccagtttttcctatcatttcttcttatgttccattaatcgaagcttgcacacatggctacacttagttgcaaaaaaaaaaaaagaaagaaagaaaaaaagtcaaagaaatgtaggaacttgtaagttatttactagcaaggaaaagggggataacctcatgagagaagccagtgcgtaggctctgcccaggtgcctagctggaggctgagattcaaaccctgtcaccaaaacttgtgatctttttgtgtaattgactctcagtagatgctgaattgaaacatgtgtgtaaactttttttttatggcttggaatctttgtttctcctttgcttcctgaactaccaaagtgattctgtgacaaactgtcacttgctgcaaacatttttacttataaaacaggacatgtatcctatcagttgcgtagagatattataataaaataatccaccaattatgtcctaggttttttggtgaaactttattttttacatttagggatatgtgtgtgtgtgtctgtgtctgtgtgtgtgtctgtgtgtgtctgtgtctgtgtgtatgcatgtatatgctgggacatgcaggtcgaggtcagaggtaatttataaaagttgtttctttcctttccacttaccatctgagtcttgaggatcaaactcaggccatcaaagtctggaatttttattttattccaaataaatacatgctgattactttgtgtttcagataaccaattcacatacccactgataagcacttgagatatatatatatatatatacatatatatatatatatacacactttccagatacatacatataaatgcatatatgcatacatacatgttctgcaaaatgattctacacaaattatttttaccaaataatcactgtctttacaggagacattttgtcttaggagaatgtcattgttccaaatcctccaaacatttcattttttgctggagtgcgggtcacctgtgtgcaagaatgcttaacgatcaaacattcaggggcatgatgcaatattggcctctcacacctgtgggtctcctgcagctgggcctgagtggctagctctgtcccgggcacctccgactctcctgaccagtgtggctctgacaggagtgtaagagaacagatggagccctgagctgggaactgacacaaatcaaaagaaaccatgtagccaaacccacagtcaaaagccaacagaaataccccatgctttcagctagagaaagcaccatctccctcatggtaaaaggtggaagtgcactcagtaaggagtcgggccagtgaaacagcttgcccttgtttcccccagtgatgtagtttatgtattttatataagagtaactattttaaggttagctttggcttttttttaaatagctaagttatgggtaaaattagagaatcagagtaggtttatcattgattgagcagagagtaactattaaaccacatcacataaaataattttatttctagaagaatttgtttaagaatatagtatttagtggcataatgtttgagataaatggctttcttaggtgaccactttgagatgtttaagactcatttgaacatttggttaaaaaaaaaaaaaacctttttttttttttttttgcttgttttgttttttgtttgtttttgcttttgttttattttgttttgctttgcttctttgagatagtatctctctacatagccctaacggtcccagaactcactatgtaaaccagactggccttgaattcgtagagatctacctgtctctgccttctgagagctgagattaaaggtgtgtaccaccactgcctggctttctaaaatatttttaataataaattcaatgtattatatagtcttgtgctgtcaaagcagaatgggagtgagtagagtctcatgctaaccttttgtccaactctggaaaatatgctctctctgcagattctcattgccaagtctcctctggctgccttcacctcctttgtctacaccatcaagggggaaggcctggttcttcaaggtaaggtccctctgctaaaccaatgtaagcgtgttcttgtcagggctgctcactgccagtggcgagtgttgcctgggtccttttagatgctagtgcagggcaactcaaagcccaagggcagttagctgatggtatttattttaccctgataagatcaagagatttgacacttgtaacaaacatttgtcaggagggaggaagagctacaggacttagtaagagaggaagggctggctctgcggctcagcggtacattcacttatattactgcattataacaagcaaaacaaaaggaaaaacaagcaaaaaaaactgtccaaatgggacaccagcagaaagaaagaaagaaagaaagaaagaaagagagagagagagagagagagagagagagagagagagagaaaggaagaaaggaaggagagagagaaggaaagagagaaaaaaacaaacaaacaaacaatctcttaattcataaagagattctgtaggccaatatgaagtatgaccataaaattgattttaaaagggtgtgtgtgtgtgtgtgtttctacataatgtcaggtgcctgtcatattgaaacctgaggttaacaggtgtcttcctctcctcctctctgccttctgtttgaggttggatcccttgctgagcttggacttgaccttttggctagtgtggctagccagcttgcctcagggaatctcctatctgtctcctgtattgagattgctggagggcagtcacacggccagctttccacagggagtctgggattctccttccacagggggtctggggttctccttccacagggggtctggggttctccttccacagggggtctggagttctccttccacagggggtctggggttctccttccacagggggtctggggttctccttccacagggggtctggggttctgaactcttgtctccacactttcccagcgagtgttttacctgcagagttggctcctcgggcccaaaatggggttttaaattacttaaattttgtttcaaagaaccatttcctttaaagccagtctttgtcttaggagaatttctgtaacgcttcctattgtttgtgagaacttgtctccaccaaggtgtgaactgtgcaaagttctcaatgcccacaacctgcagggctgtgtggggaatccctggaccatcatttccctgtgctgaagtcccaaagacacttcttctagcttagactctgtggtaccatggtccttgggtttgaaaggagccaggttcttgctcaaggcaaagctccactggaccacagcccgggctcactgatgagcagttcctcagcctagatgctccgtaccctgcttaggagaggctcttgacattgccaggtctttccagaaaatacttaacatgcaaaaggaaagtcaagacttagatgattcacctcttgagtgaactgtctaaaactgctctgtggattaaagacgtgtttaggagtcacatttgtcctgcgctgtcaggccagaggccccacccacggggatgcacaggcgaacatctgcccggaaccataaagagccttttgccacggctttgcatgggaggaatgcctaccctgcagggttttatgaactcaggtttttccccaggtttgtaaaacagggcagttgcctctgtgtccccaaagagactactgcattgcagaggcgcagcaggggcgggatggagagctcacacttctggctgagggataggctgtagccctcccttcccttccccactctaaaatgtctgcttcttaatggactctcaatcagtgtatttgtttggtgcagctgagctccacagcgggagactctcaggtctacaaaaatttggggtaagaaccactgacctttggctcttagcctctgacttatgctatccgagttccttggtaaatattttttttttttacaattgcaaatattgttttctgacaaagaagcagagattttaagaccagattaagcaaagcaaacagcaggcccctttgttacatactctgtaagggtgtataactaataagcagacagaaagctggggttcatatttacccagggcactgtgtaggttgggagggagtgcctcatttttagaagctgtcttaaaagattagaagcctagtaaatagaaaatttagatgaagatttcagaaagtctaaggggaagatcgcaagctaaattcaggaagaaaagaatctgttctgcccagagagcttgtactgaaagcctccctgcaaagcgtttctaagcttgtctaaagtggataacatcagtcaagggcgttggcagggaccagattcactggttacctccctcctgttcattcctaaggccatgatttagatgagaagagagaattatttacagaagaatagaaactgaatatacagttgatgagtggaggtcagaagccaaaagggcctcacaagcccaacaaactgcgggaatttaattcccagtgtctacattaaagagaaaagaaaagaaaacaaaacaaaacaaaacccaaccagatgcagtggcacacatctgtaatcacagcaatcctatgaagagatgagaggcaaacacaggagggcaaccctgaagctgggctatcctgaagtatatatgcatggcagaaataacaagagagaccctgcttctcagaaaggaggtagagaggctattcagttagaagtgactgctgctcatatagagaacccagtgtggtgtccaacattcactggcagctcgcaaccatctgtgactccaattccaggggatttgatgcctcttctggcctctgtggacaccaggcacacatgtggtgtgcatacatatatgcaggcgatatattcttacacataaaatagaatctaaaaaggaaaaagaaaaaaaacagaaggtagaagaagagaacaagcctcaaaagttgtcctctgacttccacatgcatgctatgtcatgtatgtacatgagcatatgcatgcaaatacacagtaataataattaatagtaataataaatatagctacagaagaaactagaaaccagcaaagaaaatatgttactgaaggggatggacctggatcaatatgtccaagaaagaagagaattcaagaaaatgtcaggatgaagagtttccaaccaatagaaaacattcccaggggcggggctccacacctcactggctgctggtcccagttcccccagaagcacttccctgtgagggaactctgtctcctgtcagcaatgcctctgaacctctcatgccctgccctcttgccaccatgtgctcctgactcttctggggagatgggggtgggggtggaggttagggactagagttgttctccccagaaaacctgagcctcatttttatcagaaagagtgcttggttttccgttccaactctgctgtgtgatttggagaaaagtctctggggccccagcttttaagaaccatacagtaacctgttatcagtcagcaatgaaactggttcgtaagaaccagcattgagggggctggagagctggctcagcggttaagagcactgactgcccttccggaggtcctgagttcaagtcccagcaaccacatggcagcttgcaaccatccgttatgaaacccgattccctcttctggtgtctgaagatagctacagtgtacttacatatgataaataaaataaatcttaaaaaagggggggggaactggggggggaggagaggaaggagaacaggaaattatcaggttatatcacatgtgaaaggaccagtccataagtgtgtctgtatgtacatggtgagttatgtatgtagaccacaagtgacctgtggcttagactgcagtaggcagcctgagccatccctaaaggcctccagacttccatgtacccacttctcctgggagaccacatacttctgtctctcctctcagcacaggcgttaccttgagatcaccacaggctgaaacacacaagcttactctcaccccgattttagcagctgagcatgccggaagccctgcgtagtccccaggtttaaagcagagaatccctgctccctgtataataaacctggagaggtgcctgcagctgaagccacaaagctttcctggtggaagcctgcagttcctgcctgcaggacacagaggagggcagtggggaggttacctaagaggctggggcaggtcctataggctaccactaagagaatggcaggtgccattgtagcttcctgtcagtctggaggagagagtgaggctggagtggtgggaaagcactgttagctcacgctggctgctctgggggtggggctgtgagtgaccgtgggaatggtccctcggtgccttttatccctctgcaaaccccaaagattgctaatacctgaagctctctgtgcacagcagagggagagaatgaaaggtgaaggcgagatgtgattgaccagctccacaggccattcccctcacgagttctcaaggattaggacggcgagatgcaggcggctgcgactgggggcctgacaccgtccctcctctttgttcactggcatgggagagacaatgaaagggcaggctggaaagaccaagggggtggttagagatttctcaagctgctttttgaaacccttgaaggagccagtccatgctattgttgtagtaaaatagaaagcggaactattctcctttggcaaaaaaaaaaaaaaaaaaaaaaaaaaaaaaaagaaagaaagaaagaaaagaaaaagtaaaagaaagaaaagcaccctcccaggcatcttcaggaggctgctggaccgaagccgttaacatggtaataccatcctgtttgcatcttctttgtctgccctgcatttgtctggggttctgcctcctcacgctaggccctctagggcctaggaaatacttagaccccaaaggagagggagccaagcacccagtggccaccagcttccaagggccctggccgttagcaggggcccaggtggagtccgagggagagttcggtcctttgtaccactggaaggaggatgttgggaatggagaggaactgggaatctacttttcctttaccctccctggaagcctcagtactagcaagtggtaacagggctgaacgaagcagagaggactgatggactgatggactgccaggactgatggactgggttgaaggtggagggctcaggagggaagcaggaaagccattgatttgggggataggttttaataggggtgggcgtctgagcaccaggctacgatcggggaagagagacttcacggggagctccagtttgacctacatctctctgctcgtgcccctggtctcagtgagatgcaaatgcaccgctagggctggggagatggctcagcgggtaagagcactgactgcttttccgaaggtcctgagttcaattcccagcagccacatgatggctcacaaccacctgaaatgagacctgacgccctctcctggtgtgtctgaagacagctataatgtacttatgtataataagtaaagaaaaaaacagcactgggatgggagcagagatgggaagccaagtgtgtggctgatgctaggggtagagggattggtgcaggctgggagaggccagctgacccttctagagtctgactgggtgaaggaccttccaaggaggaagctggcccagtgattgaagagggtggatgagcaggcccgctgtcggctgctttgccttgcagtctcctttcctcaggaatccagggagtggttgggaaagcagcaagccaagttgtttttaaggaggacggaagacagcttcattgcccagtgagacagaactttgtatgtcttccattgtttttacaacacgaggctctagcatgacatgttggctttggctctatgcggtcctgtactagttcaggtttgaaggagctgaggggggtggggaggcatgagagaggagagcggaccacccggacatggctcctgaggagagacgcaagtgccagcagctgtttctttggagaactggacagctgcgtgtctctgctctcttgctcagttttgttttttggttttttttttttttttttttttttttagttttttgtttgtttgtttgtttttcttaccttatttgagcacctttggaagcttacggggaaagacattaatctgctctgaatgtttgtcccaaacttgggctaaagtctctaaccccacttccttagtcctaagccacctaggagacagtatggaagaattcgttcccctagatactgccgtgtgggtttattagccttcatttgcaatcagtagtctatgtaaaggtttcttttttggcctcttatactcaaagtgacaccaaaacttctcaacgtatttccatccgggtaccgatgtctacatagtaaatacatcccacatacctggcacagcccaacattcctgtggggaactgggccaagagccctgaggtttggtgaagcaagcaatgctaattctcctcccagagatcatggaggcagaggcagagctggcctgtcactgtgtccctggtgggccaggtactgatgcagctctactactgacctttagccccagactgaaaccattttgtaaatacagaacaatacagaagtcataaaacattagttttatgtatatttaatacctagaattaagtttgaaaattcccattggtttcattttctttttttaaattatgagagtaaaacttagcaaagctcaagtctttaaagctattgcccaagccagcccctccacccctcagttcacagagtcgggctctccagtgttgcctctcttcccttgctgctgttcttgaccgttttcctgtctaggtgtgaagccacacggaatgatctcttctggggtacattctagaagctgtgaggatggtttatcatgcacagtttacaacttttcttttgtcctttaacgtgtttccatgatatttctatatcgacagccgtaagttggtgttctttcacttcgggtaaccgcatccactgcatgcaaccccactctcctgttcatggacattttttacaaagatttacttatttctattttacgtgcatgtgtgtctgtgtacaacatgcagccctgtgcctgaggaagccggaagactatcagatcccctggactagagtttcatctggttgtgagtgaccatgtggctgctgagagttgaacctgggtcctctgccaaagcagtaactctgacccattgagccgtttttttcagagccccctttaattttgattatttagagcaacgggtctccttatagatcccttagtaggcatgcaggaggcttctctaggaattgctgagaagggcagaggtttccagaggctctgcagggtttctgtccactgttccacttgagcctcccctctgcagagatttcccactttccactcccactgaagttaatgaactgatttctgtgcagtccatagcattgtgaggcttttgctgattttcctaagccggtttgtgcttctaacaattctgcctttggaatggaagattttgtgtcctctagcaagagctacacagcatgtgtgtgcttctaatgtctacttaggtggtttctggtgagaattgcttccctgcttaaagttagctacacacacatttcctccaagaaccctgtaggctggtccaccactttcttcttcgggtaaggaagcggttccaagaggtgaagtccatccaccccctccagcatccagcctgggcctgaggtttagaaactcccctgccttggcaagccctgtagccacttagctctcagggttgcgaggcctctgttgacaagctgcaagccagtctcaaatcttaaatcttgatattctaagctaaacgatacatcagtcatcccaacctaatgatcccttgagaaattctcgagggtagctggcttgtaactttgctgggtataacccctaggttagacagtgctgcacagctcagaggactcctgctttctcacacagcactgcagaggaatggggcttgaaactggcacgtttgttcagggacccagtctaatggcttaccgctccaccacacctcagacacgaccgaccgttgttgttttagcccagaatggctcagcatcttgtcttccaccaggcagcaggatttgtgtttggtggatacatggtgagacgagagggaacccattcctcttcctttaaggacccagaagctaacacgctttatttctgcttacatgatgttggccaagccgtagatgaaatgcttaacggaaaggttgaaaatgttagtaatctcagtagtcatatgcccaagtaaatgagatatttcaagaacacacccccttcggaggccagttacagagactgcaggggctctcgtacagatgctaggccgctcacagccttgaaatgcaacactaatactggatgattaaaagttctgtctttttctctttggtttctgagactgtagcaggctagaacagtcagttactcttccaaaaatcctgtcccaaccccacctcagtcttttaagcaggaactaaagtgtgtgttttaactagtatggaaggaagaaactagagaatgaacttgggtccaaagtcatagactacacatggttttttccccccccccaactgtttttctttttccctgcctacacttttgctttctttatacattcgttgaaagatagctagagaagaaacccctttattctaagacctgggctatacttaggctggctgtgtgctcctctggtagaatctggaagtcattcacagagctaggagtttgcatttgttaaaacacccaggtaataatacgaaaagatgttaaatcatttgttgattttcttcaaaaaaaaaaaaaatcacttccaaaagggcttggcgttctttctcaaatatgatttaagccccatgatggttagtttagttcagaacatgctagttgaacacctattgtttacaaagctccagatgcagaggacgtgggggagggagaggcaaagtcccttctttttagctcaaaagaagatgtagttagataaatttaatcaaaaacagacggacacctgttgcaaaggtttgacaccccccctcccccgatagggcttgaaaaggataaagagagagattctttccagctagggatgaccaggcatggttgcctgaaagcatgcgggccttgaattggattcagctggtgaatactgacaaaacctgcatcccattgtctctttttactgtttgaggatagatctggagaccctggggaatgctggctacttctagcactgaccctgattagtgacaaatgttgaatcgtgctgactaatgcgttctaaatggattgactcaacaataaagggacatcgagagtcaagagttcaggtcctgactctcacccatgtgatgaaatgcaaatcgcttcgcgcttcctcctcctctttgctttctctctctctctctttctctttgtttgtttgttttattcatcgattaaaacatgtttgtcctgagaatcagtaggttaccttggctagtaagtgctttacaaacttcaagggtggcagaaatgctgagcagctactactactgaggacaggcttattgcagccttactttatttcacaatccataccgaatcagtctgtccgtccatccgtcacacgctgctcactgaccatgcaaaacttccatttcctcacatgtgccccgggaactgacagagagtgaactgcactcactgacaaataggggagcttttgaaaaatcttccatcaacctactggggcgtccgggcctctggacaacaactgtcagcacaaaactaagcacccttccgttgtgcacaccgctctctctctcttctgacacctccccagcttgagaacctggccttccatgtccagatgtttactgaattctgaagcccccccttcaaagggcccaaattcttttgttgctcttcaaatcatttcccacagagactgaccagtgtcctgaaggagcccttcaatagggaggataaatggaggccgatgaagacacgaccccctgaggcgtgcccgcaaccactctaacaaagggcctgaggcacaaccttgtaaggagtgttttggtcagcagcatccctatgagaggccacgtctcccctacggggctgctttcaatggctctcaccatagtggacgtcctgggcgtttgttaagggctgtggggtgctaggtgcagcataaaacatctaaatcgggctcacggcctttgtgagggcttcctgagaccacagaaggcagctggctttctcaggagaaacttaggggtaacaaagccaaagggggggctcctgtgtctttggatgatcctgtcccacctagtagagatagacttccccttttgtctgtggctctttggcagtcaaagccagagttgctggaccttaaccctgactgggccatttctgagtgtctctggggcatgcagtggttgactctgtgggaggggacccctgcagcagggaaagctttggttaggttactagtggcaagctagtacatttcatgacaatttctttttaactttctctttctttttcttcttagttttttccccctccctctcttgttccttttaggccacgaaagaccatagggatactgtgacctttgtctagtgctgattgcatgtgactcatgaaatgaaacaggactgcgctgcttggaaaaaggaaacggaagccaacataatgaggattaattggttggttgctgttgaggtggtaacagtgatttcagacccggaaggtgaagatgaagaagcctttatccagtctctggatgcagaggctaggggctccaccaccgtgggatgtcagcggccatcgtaataatttgcacttacacagcacctttcagccatgcccctcaaagtggttcagccacattaattaattaaagcccacaatccccctagggagagcaggagggggactaacaagatttgtaattacagaagggaacatttccgaataaagtattgttccgcaaataaaaagaataggtgtacaaagaaccggggtctccaaagagtaactgattcacaaatgaaatatcgaaaccgtgggggaaactgaaggcggccatgggcgtgggggtctgctctagtgtcagagggaggtcgatggcctcagaactcgctgacaggctcagacctcacttcggagcagagcgtgcatggtattagtgttgtttggaaggtcattagtgctgtgactattgtaagtataaattcacgttccactggtatattgtgcatagcctcgcagaacaaagagtgaaattcttgcagtatttaataaaggatgaagtggtttctttagagttgaaacccaaagctgggccactcaattagcaaataaatcaattggtgacccatggggtaattcagtcctttccctcggatccccagcccaccagttcccactgcccggaggctcctagctgaagtatcagattgagatggttcagtgcaatgtttgcggggcttaagcctcctcaaagtcaaagtttgaatcttcccagggctggcaaggtggctcggctggcaaggatacttgccactaagcctgatgacctggattcagtgcccggatcccacatgtcagaaggaaagagccagctccccaaagttgtcctgcgaccgctgcacatgcacactgcacaggcaaaaagaacaaaagacagaggaaaggaaggaaggagaaagaatagaaagaataaatgtaaaattattttatgtttagtaaggcatggactcacaatatagccctggcctgaaactcactgtgtagaccagactgtctgaaccactgggtactgggattaaaggcatacactactgtgcccaactataaaaattttcttaacaacattctttccagcctctggcaacctatcatctcaggtggtagtgaccccaaactgtagtagtgtagaatcaccttgtgcctgctcccccttcagagatttttaactgtcataggagctagagtaagggttatatcttgtcgtgtcccccccttccctgtgctgaaaagagtgcaaaaactgaggtgagggtggtaaaaggctgcctctgccaataagttaggaattgctgagcacataacaatataaagtggagctagagaaatggctgagtggttaagagcactgactgctcttccagaggtcctgagttcaattcccagcaaccacgtggtggctcacaaccatctgtaatgggatctagtgccctcttctggtgcaagtggcaaggatacttgccactacgcctgatgacctgtctgaagagagcgacagtgtactcacataaaataaataaaccttaataacaacaagacaataaaaagtaacaacatatgctcctctcaataaatgaaccaagaaaactcattctaataaccatacaacaaaattggatgaagtctcatggtggataaagttgaagtgttatgctgggcaggggtgggacggtgcggaggtggtgtcttgctgtgctggagttcctgaggagccagtagcatgctggacatgagggagcgaggaggatttgtacgggtttggaagcagatgctccagttgaagccatgcgcttcctccgagggggagacatttttgagaacttgtggttttttccatagtttcacgtgcaaaccaagcttagttttgcagctgattaaatgtacatttctggtgcattcttttttttttttttttttttttttttgaggcaggcagatttctgagttcgaggccagcctggtctacagagtgagttccaggacagacagggctacacagagagaccctgtctcggggaggggggggggggattctggtgcattcttatgacaggaattggctaaagtcaagacaacagaggagcgttggagaagatggtgaggaggtttagcagacactagctctgtatataaagaaacaacaggaggaagattgatgtctgcccctttctctccctttcccatgagcagctcataaaacctggccagctttcttcccctgaagcaggtcataaagacttcagcctagaactgccctccctgggccctgaggaaaggaatgctcttatctcttagaggcccggagatgaagagaagaatatgggcaaacagagcagcggtacctgcccccaagtttactgccattagatcatacctgcttatcctccaatcatacttctgcccactctccttcaaaaggaaaaagaaaaaactctacacgttttcctgtgtctttgggtctccatttctgaggattctttgtcatataaaacatcagaaagacgtgtatgcttttctctcactaatctgtcgttggccatagaggtccttgcggagggcagggtggggatgggagggaagagtaccaatgcttgcctgcatagggaggctgagacactccccttgagcttgtagatgagatccttggacaactgacagagccagtaaataagaatccttaccaagttggctctcctagatctgtctgcaacaccaggttgagaggaaggtagagatgtcttctcttctcatgtttcccaaattgctttacaggccaacaaatgtgtttgaactgactgaccagagctagctgggagccacctattcatccgaccccctctgcagcactacctcctctgctctcttgtctgtctaaggctctgatgctcggctttactttcctcttatcagggcatccaagttttgcatttgcgggcagccatcttcaggctggagagccacaagggtatgggttcatgaacctgtacccagtgagactcttaagaaggtctctctgtccttctttcttatttcctttctacgggggtggttttggatctggcaagagctgcatctttttagtctttcttaatgacacacacacacacacacacacacacacacacacaccatagacacattcaccatagacacacacgtttatatatattgttttgcgtttggcgtcacttacctcgtggtaaatgaggaaacactaaaagtttctccatcttcaggaagatgtttattctctaccacttttacttggatctctctccactttgactaaactgaaagaaaaaagtgaagtgctccttatattaaaatggatcccttcctcgaaagtgtctgggaaagtattaggacagagagcaatcccctaatccaaaaatgtgaactgctgactggcttcatcctagagacttttctgggtttttcgtttggcttgattttgggttttgagcccaggaacctctgagaactctattcccagggattgacaaagccacatagtcctcctctcctgctctgagggtccccagaccttttgccatatgccatgctgctgggacaggcctgggcactatgacagctcacaccaagcactgtatggtgtgtgacacactctgcacacttagtcccagtcctttctccagtctggtgaggttggttgtcacagtgttccttaagtactaacaggaggcaaaggcaacagaggtcagtctcataacagaaaagacagagaggggatttgaacctgagtcctttgcccatgtaatatttctgttcacagctactgtagcctctctaactcctgcctagttcactactatactcagcacaatgctaaacacccaattctatagaaactagcaatcatttcccacataattacagaagaaacactactggttagatcctgtgccctgagtagtggctgcagaaggcttgggcccagggctgaggaagagaacagaagtattgctatcaccttcttcatctctaacactattaaaatactgggagacacatgcaggaaagctgcacaggagagaggacacagctgggaacctgccaggctggggtacccaggatgtgctactagggtatcttgtattattgttcaatttattgatgatgtccttttttattatgtgcataaacctctctggggggagtgatacttcagttctggggaatattcagaagaagaaggtctggattgatccagaagtgccaaacactatgcatgctgtcttttaaactgtgtgctatgagtaaaacgaagttgcctagtcaggattgcaaaagtaggactgtaaaaacccttaaaattgcccaaagagaattctagaaacaggataaggctgtaggtgatggggaaggagtccaaagtatctgattctaaagcctgatctcggctcagcactgcccaggaggatggattgatcactgggtgcttgctatcagctatcggctctcagctatcggctcagcactgcccaggaggatcgatcactgggtgcttgctatcagcctcatgggcatcacttcagactccgcagctatggaaggaccagccttactccactagagttcacacttcaacaccagaggtctcttttcagatagaaggaaggacccaccagaattctcagccgaatatgctagattgagagaaaacacagcacctgcctctctgaattctgctgaagacagaaatcagatgaaacacgccttctctagcaccccgtgcagacctggaaagaaagaaaatcaacaaatcgccaaatataaatcaagatttgattttgctgcccaaataccagagactcaaagtctgtgtgaacacccaagttctctggacgtgctcccctccaggtggtgactccatgtgcacttgagtgtcagtgtgcccttcccagggccactttggcatccagaggctgagaagatgcctcagagaccaagagcacttgctgctcttgcaggggatgcaagtttcagatcctaggacccacagtaggcaactcacaccacctgtaactccagctccaggacgtcgtgtgtgtgtgtgtgtgtgtgtgtgtgtgtgtgtgtgtgtgtgtgggtgggtgtgtgtgcgcgcgtgcacatgcttaagacagtctcctcccaagaaataacacaggccacttctcctagactttgcacttatgcagcctcaacctgaagggagtaggggcaggagaggtcaaactcgcctgaagagaagaactcttatatactagtgaccacacgaacctctgccttagtgtgctggcatgggtttcctctcagagccactccttgcatatacctccccttggatccattggcatatcaaccatctctgtggagcagtgctaagggagggagacgtcttttgtttgtttgtttgtttgttttttgtttttggttttgtttttggttttgtttttttttgttttggggagaaccagttaactccacacttttctcttcatgctggtagctgctaatagctctgggagagaagagtaagtcaaaaggagtggcccgctctgcctgatgctctgaggataaaacaggcaactgtgagctgcccgagacaatcttactgtttgtggagaggcttctggagatgttcttctgttcctccccttaccagacatgattcagattccctctaagccctgtgacttccagaaagcagctctccctgcagggggagggggagaaaaactttcccttattattcccaataatgaatccctgctctgagtggactccagccatgtgttttcagtcaagtaccgatggcagccttgcctggggacacttccaagacactgtggacataatagatgaggtctgtattgacaagagctgtccttcggtttccatccaggtcagcctccctgaaatcagacaagaaatgatgagccaacatggctgccacacccctttgcttcctttgggtaaaaagatgtcgggttttttagagctctctgccccggatcccctgcagctcaccatagatctagagcctagtaatcggagaacttcttgggatcaaaccaatttttattttatttttatttttttttgtagatgccaagacttcctttcttcaggacccaagcataggcttagcttcctctgacgtcccaatagcaaaggagacataaggctgtaacatttcctactgagggcttcccataaagcctctgttcaagtacacaaaccacaaactgtttccaaataagctgtgctgttggccacatctgttaagacagccagcctatgcccttcccagagcaaccggcctacacagaacgcataccctcgctgagataagttgggctcttttcattgggaaaaaccagtattaattccctccagtaaaagttgtcatgttattcaggacaatagctgtcaggactggaggcatcctcctgcctcactgacctgcccgagtgtcctgcactctatagttctaatccctggggcttcagtgacaggtggttcctgtacttcagcctttcagctaccatccctctcctcccttcccctcccaccccaccccaccccaccctccaggttaacattcctaagaaagcactttattggctcagtctcctcttattggatctcagcaccgctgctcactagctagccccagtggtgggctggaaaagtaattggaaacatgactgcctgtgccccaaaggttcaaactaggctgcttaccccagagagaggccgaggcatgatgaactcgagtccactccttcaatggggatctgcagggctacccattctctcctgcacttctctctcccccttcctgtccctgtagacctatcccttatactctgtcacaccaggaaatttttatttttttctccacctcccagctgtctggtcggtgttaacatggaccctgttaatgcacccagtcacagagatctcatactggtagtgaggctcttgagaattatgtaagaatataaggaaagagaaatgcatataaaaacctctctgctaaagcaaatcccatttccctcctgaggcctgtaccttccccctcctagtccttagaataatttcccagaattacaagcaaaagaggtgcttgctctgaggagctctgaggagcgggtagggcgatccttcatctccgttcatctccctggtgccaggttcttaactaacacgacgcaagcagtttgctttcaaactgaagcttggagcgcagctgaagggctcctttaggataaaggtgtcggcaattgtgttcttcccaaatgtccaaaactctttgaaattattcacaaatcttcgtgattttggaagactggtgttgtgtgggcacgaaagctttcaaacactataaatagataatagtgaatccagacacccaaggactggagggaaagttaaactgcaactccagttttaccatttagtcactggacggtactagcttctgtgcctcatcagatagctgaaagcccaccacagtctgccttcagattctagtgtttccatgttctttggagtggtcacgcagttatgagtgaaacctaaccaagccgggtgctctgccccaccctgagctctgggtttgtcagtgctgatcagatcaccagtcaaaccctttatgtgactgacacttttatctactgactaaaaccatagcattctccttgccgagtaagatggccgccaccataactagctaaacctgctgctctgggattgtagaatccatttttcctggatcccttccagatccctgctcattccacttagagtctgaggttgatgcctattgccattggctgtcctctgggactgaagagcccatctgggctttgtccagcttctcgtgccagcaccggcatccaaactccacagtcatttccaatccaacagctgggaggttgatgcagagacaaagcagaagccagcttggcttcctcccagttctccagggccctcaggggttaatcagcaaccacctatctttgtatggatggtgtaagcctcagtagaacacctgctaagacccacaggaaagctgatgcagaaatggatgtcgcagccgttactctgaccgtcactgtttaagctagatgcccgaatctctgaataaaaacaacccgctcaaaccaatcaaccagcccaggagacctgtagctctgatacctcggattttgtctgttccgtgtttcataagttccttgtgctgtgaactttaagccacatcatcttatgttggcacacatggtttagtgagggggtctgagttcacgttccttaagtggcatcttagcccctttcccctccccacagcccaaactggcacaactgccaacttctcttggtagctaacccaaatgaccttgggcactggggaatagcttatgcagggagggaggaaggtgagagaggaaataaaggtggagggagggcacaaacacagcctctggctgctggtgtgtgttcaggctagtgtgggagactacaacacactatgtggtttaaacacccgagatgaactctctcagagccttgggggggctggaattccaaaatgacaggggtttcctggagcctctgaccagggtttgcagacagtggtggcatcttctgaggcctttgaccttggtctgtgtcttcaagtgactgtctactgtccatgagttcctacagtcacctccgtttaaaaaggtatcacttcctatgggattagaaccctacccttctgaccccacttaactttatttatctctctcttttttttaaatcattcctttattttagggtttttttttaatcatttgagacaagatctcactaattatccttggctagcctcacattcatgtgacccacccagatcttaaacttgtgccatccttcctgcctcggcctcccaaagcacggagacaacactcctgggttattttccttcttttaagagatatgactccaaataaagtcacatgtgacactagtgtatcaacatatgagttctgaggtggcgtaacacccttagctgctctcggcagcagattctctcccatccctcagtattgcccttaccttacctaagacgcaaaggcatggatgtgcattttggaaattgttaagggagggaggggcgagtaggcaagaagaatgaaaagatggatgatgggtggtttggatgaggtaggttgactgacaggtgactttggatacattgatggcagcagggtagacgttgcatgctgctgctttggccttgtagctttttgcagtccaagccttgtggctgagatgtctatcctgggcaggtcatagagctgtgcaaacagaatggtggggacttgactgactggggagcacatatcttgtcaaagtcaacactggttactggcaaagagtgcctgaccaaaaccaagcctcttttgaacctcttctaactatgcccccatgtcagactctgtttgtctttggtttgattagctcagtcttactaagaagactgcagaatctgtctattagacagaatgggaataatggctcccagtttttcagagactgagacggggattggtatgagtttgtggtcagactaggctgtgttgtaaggctctggatagcctggaggacaaaataaaaccttaactttttgtttgtttgtttgtttgtttatttgtttcaggtggtactctaattgttaccccttatagtcctcactctagagaccatttttcataaaagaaagaagtaaaacctctaccattgcatcctgtttatctaatcagattcatccttacccagcctcaataggaataatatgcctattaccttccatttctcctcgttaactgaccccactccttggctataaatccccactcttctttcttatgtttagtctcacttctctcctgtaaaacgttgccctttcttgaataaggccttccttaaagcttttaacaagtgtgatcagagaagcttgtaacagaactcagctgcacacacctcgagagatactggcctcaggttgcccaagcatctgattttatgagaaaacccagagatctgaatgttagataaaatatttcttaagtcttaagtaaatcttgaaatgcaaacattataagataccatgcaagacaaatagacctgttggtgggctgaatacacttggagggaaccaggttccctcccctagaagttgatgtgccatgttgtcacatgaggctgtgataacacatggctaagaattcagtcttgggggggacttcctgggttcataatctagtctaccccttactactttatgtaaccttgaccactatctgtgtcactcagagttgttgggagggtacaattaattcatacatgctggtactagaacaggtgtctccctgcctagtgagacagtcagaactgtgagttagtataggtagctagtctcatagacctctcgatggcctataaaataaatgtccattctgtaa

SEQ ID NO: 1541 - DNA, 1759 bp, Mus musculus
gggaaactttgaaagttccacgctgctgacctgattctttgggagccctggaaacatgagcagcaagaaactaagacgagtgggtttatctccagagctgtgtgaccgtttaagcagataccagattgttaactgtcagcactttttaagtctctccccactagaacttatgaaagtgactggcctgagttacagaggtgtccacgagcttcttcatacagtaagcaaggcctgtgccccgcagatgcaaacggcttatgagttaaagacacgaaggtctgcacatctctcaccggcattcctgtctactaccctgtgcgccttggatgaagcattgcacggtggtgtgccttgtggatctctcacagagattacaggtccaccaggttgcggaaaaactcagttttgcataatgatgagtgtcttagctacattacctaccagcctgggaggattagaaggggctgtggtctacatcgacacagagtctgcatttactgctgagagactggttgagattgcggaatctcgttttccacaatattttaacactgaggaaaaattgcttctgaccagcagtagagttcatctttgccgagagctcacctgtgaggggcttctacaaaggcttgagtctttggaggaagagatcatttcgaaaggagttaagcttgtgattgttgactccattgcttctgtggtcagaaaggagtttgacccgaagcttcaaggcaacatcaaagaaaggaacaagttcttgggcaaaggagcgtccttactgaagtacctggcaggggagttttcaatcccagttacatttcaaccgatctgagacatttgaacaaagtggcatctcattattcaaactctaactaggtacggactgagtaaacagcatgggctgctgtggagaactgttcagcatggcacaagacactgaggtgggaagtcgttttctcccggcttgggttaaatagcattatttgaaccagtttggcttctttctgcttatccacacagtgggaagaggcaggaaccttgcattgcttttaaagagtatcttcaagttgaccactatatttgaccaccaaattgggatacttttgaagactaaggggctcttttaatagacaccctgttttaaaaacatccccaaggcttcccaaaaacaaataaggcatatggtcaccctcaacattgtgctaaaccctatttatcccaagccttttgagaaggttgtgttcacagtgctagagagcagaccattgagcttctctgcctacaagaagataagtccattagaaggtcaagcccaagtcatgaactccattccctaagttaaagctacaagtctggattgacactatgatctgcccggttttgaacacttacttctattcctggggaactgtggttcctaacgtgtgatcttgggtccctggaggccactgagatcttctcaggaggcctgtgaggccaagccctgctcagcaccatcagaagacatgatctgccttttccattccttctgtcttactgctttctataccttggtgccaaaactgatcttagaaggcagctgtcaatgaccaggccagaacttcagcagatttgtaagaatgtaaatgatgttactcttccactaaatcttgttttagaaaataattttccttgaggaaaagaaaaagtgttatctgtatcaaagtgttttggggttattttatcttatgatttttgcaaaataaatgcatcagaagtc

SEQ ID NO: 1542 - protein, 258 aa, Mus musculus
MSSKKLRRVGLSPELCDRLSRYQIVNCQHFLSLSPLELMKVTGLSYRGVHELLHTVSKACAPQMQTAYELKTRRSAHLSPAFLSTTLCALDEALHGGVPCGSLTEITGPPGCGKTQFCIMMSVLATLPTSLGGLEGAVVYIDTESAFTAERLVEIAESRFPQYFNTEEKLLLTSSRVHLCRELTCEGLLQRLESLEEEIISKGVKLVIVDSIASVVRKEFDPKLQGNIKERNKFLGKGASLLKYLAGEFSIPVTFQPI

SEQ ID NO: 1543 - DNA, 719 bp, Mus musculus
gtggggaggaaggtgtgttcattatcttgtgctccctcttggagcctgtggctgttgataccggggtcgcggagagtcctgcgtgttgagcacgtactctgtaacggggctcgtccctggaacccggacggggtcctggagcttccgacttcctctagggaggcgagtgatgcttattctttgggagccctggaaacatgagcagcaagaaactaagacgagtgggtttatctccagagctgtgtgaccgtttaagcagataccagattgttaactgtcagcactttttaagtctctccccactagaacttatgaaagtgactggcctgagttacagaggtgtccacgagcttcttcatacagtaagcaaggcctgtgccccgcagatgcaaacggcttatgagttaaagacacgaaggtctgcacatctctcaccggcattcctgtctactaccctgtgcgccttggatgaagcattgcacggtggtgtgccttgtggatctctcacagagattacaggtccaccaggttgcggaaaaactcagttttgcataatgatgagtgtcttagctacattacctaccagcctgggaggattagaaggggctgtggtctacatcgacacagagtctgcatttactgctgagagactggttgagattgcggaatctcgttttccacaatattttaacactgaggaaaaattgcttctgaccagc

SEQ ID NO: 1544 - protein, 174 aa, Mus musculus
MSSKKLRRVGLSPELCDRLSRYQIVNCQHFLSLSPLELMKVTGLSYRGVHELLHTVSKACAPQMQTAYELKTRRSAHLSPAFLSTTLCALDEALHGGVPCGSLTEITGPPGCGKTQFCIMMSVLATLPTSLGGLEGAVVYIDTESAFTAERLVEIAESRFPQYFNTEEKLLLTS

SEQ ID NO: 1545 - DNA, 358 bp, Mus musculus
gtttagttcccatcacccacacagaagcttacaactccagaaagaatccaatttcctcttctgggctctgcagattctcattgccaagtctcctctggctgccttcacctcctttgtctacaccatcaagggggaaggcctggttcttcaaggccacgaaagaccatagggatactgtgacctttgtctagtgctgattgcatgtgactcatgaaatgaaacaggactgcgctgcttggaaaaaggaaacggaagccaacataatgaggattaattggttggttgctgttgaggtggtaacagtgatttcagacccggaaggtgaagatgaagaagcctttatccagtctctggatgc

SEQ ID NO: 1546 - protein, 55 aa, Mus musculus
FSSHHPHRSLQLQKESNFLFWALQILIAKSPLAAFTSFVYTIKGEGLVLQGHERP

SEQ ID NO: 1547 - DNA, 1858 bp, Mus musculus
cagagtaccaaccaaccagagccccagatgttgctgctcgcacttttcgcggattctttgggagccctggaaacatgagcagcaagaaactaagacgagtgggtttatctccagagctgtgtgaccgtttaagcagataccagattgttaactgtcagcactttttaagtctctccccactagaacttatgaaagtgactggcctgagttacagaggtgtccacgagcttcttcatacagtaagcaaggcctgtgccccgcagatgcaaacggcttatgagttaaagacacgaaggtctgcacatctctcaccggcattcctgtctactaccctgtgcgccttggatgaagcattgcacggtggtgtgccttgtggatctctcacagagattacaggtccaccaggttgcggaaaaactcagttttgcataatgatgagtgtcttagctacattacctaccagcctgggaggattagaaggggctgtggtctacatcgacacagagtctgcatttactgctgagagactggttgagattgcggaatctcgttttccacaatattttaacactgaggaaaaattgcttctgaccagcagtagagttcatctttgccgagagctcacctgtgaggggcttctacaaaggcttgagtctttggaggaagagatcatttcgaaaggagttaagcttgtgattgttgactccattgcttctgtggtcagaaaggagtttgacccgaagcttcaaggcaacatcaaagaaaggaacaagttcttgggcaaaggagcgtccttactgaagtacctggcaggggagttttcaatcccagttatcttgacgaatcaaattacgacccatctgagtggagccctcccttctcaagcagacctggtgtctccagctgatgatttgtccctgtctgaaggcacttctggatccagctgtttggtagctgcactaggaaacacatggggtcactgtgtgaacacccggctgattctccagtaccttgattcagagagaaggcagattctcattgccaagtctcctctggctgccttcacctcctttgtctacaccatcaagggggaaggcctggttcttcaaggccacgaaagaccatagggatactgtgacctttgtctagtgctgattgcatgtgactcatgaaatgaaacaggactgcgctgcttggaaaaaggaaacggaagccaacataatgaggattaattggttggttgctgttgaggtggtaacagtgatttcagacccggaaggtgaagatgaagaagcctttatccagtctctggatgcagaggctaggggctccaccaccgtgggatgtcagcggccatcgtaataatttgcacttacacagcacctttcagccatgcccctcaaagtggttcagccacattaattaattaaagcccacaatccccctagggagagcaggagggggactaacaagatttgtaattacagaagggaacatttccgaataaagtattgttccgcaaataaaaagaataggtgtacaaagaaccggggtctccaaagagtaactgattcacaaatgaaatatcgaaaccgtgggggaaactgaaggcggccatgggcgtgggggtctgctctagtgtcagagggaggtcgatggcctcagaactcgctgacaggctcagacctcacttcggagcagagcgtgcatggtattagtgttgtttggaaggtcattagtgctgtgactattgtaagtataaattcacgttccactggtatattgtgcatagcctcgcagaacaaagagtgaaattcttgcagtatttaataaaggatgaagtggtttctttagagtt

SEQ ID NO: 1548 - protein, 348 aa, Mus musculus
MSSKKLRRVGLSPELCDRLSRYQIVNCQHFLSLSPLELMKVTGLSYRGVHELLHTVSKACAPQMQTAYELKTRRSAHLSPAFLSTTLCALDEALHGGVPCGSLTEITGPPGCGKTQFCIMMSVLATLPTSLGGLEGAVVYIDTESAFTAERLVEIAESRFPQYFNTEEKLLLTSSRVHLCRELTCEGLLQRLESLEEEIISKGVKLVIVDSIASVVRKEFDPKLQGNIKERNKFLGKGASLLKYLAGEFSIPVILTNQITTHLSGALPSQADLVSPADDLSLSEGTSGSSCLVAALGNTWGHCVNTRLILQYLDSRQILIAKSPLAAFTSFVYTIKGEGLVLQGHERP

SEQ ID NO: 1549 - DNA, 678445 bp, Homo sapiens
gccgagagcggtggatcacgcctgtaatcccagcgctttgggaggccgaagcgggcggatcacgaggtcaggaaatcgagaccatcctggctaacacggtgaaaccccgtctctactaaaaatacaaaaaaattagccgggcgtggtggtgggagcctgtagtcccagctactagggaggttgaggcaggagaatggcgtgaacccaggaggcggagcttgcagtgagccgagatcgcgccactgcactccagcctgggcgacagagcgagaccccgtctcaaaaaaaaaaaaaaagaaagaaaaaagaaaaatttccaaacagggtgttcccttgtttcacattctctttggtgatggtcctgcaacagattttgataatcactatattgagaaactgcttcagattcgatctgttaggctgatcatagtattaactacaattcccagcaagccgcggagccaacctgggcctctgccggcctctgattggatacagtagccagaatgacgactcaatcagtgcttcggttgttgctttgcggcgttttccgcggggaaactgtgtaaagggtggggaaacttgaaagttggatgctgcagacccggtactggaaagtttcatgtggggtgccgttgtggggaagtggggttcgctcattatttcctgctccttccctaggctcgtgggtttcgatattgggggagcggagattttctcttgggtgctggtcacgcccccttaagactcgggatcgtcactaagaaccccgctgtgaattgggggagcttcgggccttcttttggtggggaatgcttggaagctgctcattgttggaaaaagctctttttaggggattctgggtgatgtttccgcctgttgctgcccatcttcctccccagccccttcccgcttcgggcagcctgtcattaggggaagttgagggactctcccacttcaggtggtgttggagagcgtggaatctggagtccggtccctggattcgaatgcgagcttcacaccaattgtcagctgtttaactttgcccaagtttctcaactagttacctcagtatccttatctgtaaagtgaggtaaaatatccgaagcctttggaacagtgtggcacgtaataagggctcaataaatattagctaatattgttcctaaacagttgttgaacatctaacatgaagaattttcttttcttggtggtaaggaggacagggttcattctccagggttgaccgtctcccctcatgtgcaatacacatacgtgctttcgcgcacacatacaccgcaggaatttacgtgctccggtgggggcaaacaaacttgcaagccataatagtattttgataagattatcgaatagatatgtgcgaagttgatgagaacattggagaggaaaagacttgactctggggaaggttttgtggagggaagtcagggagacaggatgcgtgacctaccaatacacataccatgtggctggagggcagatcatgtgagagtcattaaatgatgattgctgaccttaagtactatgtgccacgcactccccgagtcctttaacctccactacagtcatatgaagtagtaaattcatatgactgtaaaacaagggttttaaggaaattaagacactgagaggtgaagtaactgccaggaaggataggaactgaacgttgcaatgtgatgtatgagtgagaaggaagtgagggaccaatttttgatgtttttctctgcgaccctaagaagtttggaatttatcctgtggtctaccagtcccatgggaagtgttaaaggataatcgtgactttttaggaagctactcaaggcaggattgtgacactgatctgacttttgcaggcgaatttggggcttcttcctgtctgcttccatagcacttttaaatagcaattgtaatgcttactgcatggctgtagttatttgtgtgtacctctcttttcatctcaactatgagtattcaaaggggagggaatatgcttaaatgattcttgtaccccagacctcagcagggtgtgtatttaaatgcctgtggaaggagtaaattaaggaacaaatgaatggagtggccagaaacaatatgcaatagtccaggcaagtgatgggagtggccctattaaggcagaaatggcagaattggttgttgttaaagtccttgtagtttagaatttatagttttttgtttgtttgttttttgtttttgatagggtctcagtctgttccccaggctagagtgcagtggcatgaccacagctcactgcaggctcgacctcctgggctcaggtgatcctctcatctcagcctcctgggtagctaggactactacaggtgtgcggcacaatgcccagctaatttttgtatttttttgtggagacaggttctctctatgttgcccaggctggtctcaaactcctgggctcaagcaatttgcctgccttagcctcccaaagtgctgggattgtaggcgtgagctaccttgtgtggcctatggttcttttctttctccttctttttttttttaaattgaatttatcagtctaaatggtgtcattacttgaaactacctgatctgaaaagacactaggcaatattatagcaggtatcacttggttttctactgggggaaacaagtcattgctaacaaattcccatggagagaaatgaggaggatgtatttttgtttgtgagaggtgtgtatgtatgtatattgtgtgtgcgtgtgtgtgtgtgtgagagagagagattgattcagtctgattcagagaatttaggtgttaaatagaaatttgggccatggtattggaaataaacaaatatatacattctcagtatacatatattttcattccaaaatgttacttcttttctgataactatattgctttattccttggatccatgaagagttcctgtttcagttcgttccagaggatacttctttaccatctcaatgagatatacagcttctcctttgtatgcattaagagactcacagtaattcttttttagctctgtgaagataaatctttcatgagcctcatttacccctagcaaggtacaatagtgaaatttaactgcatgtgagaatataagcagctagtgtaataaagaacattttgggccaggtctgatcgctcatgcctgtaatcccagcactttaggaggtcaaggcgagaggatcacttgagcccaggagttcgagaccagcttgggcaacatggcaaaaccctgtctctacaaaaaatacaaaaattgggcaggcatggtgtcgaccctgtctctacaaaaaatacaaaaattagccagacatggtggtgcacgcttgtggtcccagctacttgggaggctgaggtaggaggattgcttgagcccaggagggggaggttgcagtgagctgagatcgagccactgcactccagctggggtgacagagccagacctgtctcgctctctctctctctctatatatatatatttaaaaagaacattttaatactgcagtgataaaatctcatttgattcagaaggtgtgctctgactcctagaaaaaggaagagttaaatatgattatggacttgcagtagagtgtaatggttaagaggataggtttcagaattagactgcctggattcaaattctggatcagttatttatgttttctggtgacaatggactagctaacttttccaggctttagttttctcatatgtaaaaaaggggccaataatctactttccttctagggctattgagaagattaaatgtgataatttagataagttttggaacagtgcctggtatgtggtaggtgctccataaatatacctattgccgttacagtgcaatgtaaattgttacagtgcaatagactttctagtagttctgtttggaaatatgccttgaaagttaattacatttccaaataaaatttatacatgcattgaacattttaagatgctctacaaatgtgaagtggtactatattcatgtagtaaatatcaattaattgtgtgaaattatatttgaggttgccttgtagattttctatgtgcctgtttgacgaacaattgtccctcctatttaaaacatttaaaaaggttctatagcattcctttatcagtaatatttttaacacaatatgtttcattttgcatatggagaaacttgaggaatttttaattttgttttggatagcctattcactatcacttatgttatattctgttgtttttttcatggttcttcttttctttgctggatctggaggcatgggtagcaagaaactaaaacgagtgggtttatcacaagagctgtgtgaccgtctgagtagacatcagatccttacctgtcaggtaaattttatttaacatttttattgataagttttatgcacaagttaactttataccttaatacctcttaaacttgaaatatgaaaatgtaggcttacaaaaaaaagataaatgatggtgcttttccataggctaattgtaaatatcaagcctccttgggtgcatttccaactgctatttcatttacccaaatttagtatttttgcattttgaggggaaagtggtcacggcataaggtgaagtaacagctttactgttttatagttacatgagaaataggactcaaatgaggagatactattcaacatgtatcatttctcttaaaagcaaaagaaattaatagaccattttcttattgatggagcatgagaaatatatagagcggatcttgcatttttaagcaaggtggtgaagcaaatcctccttagcagggtaaataagatttaaaggttttggttggttgtttttgttctttgttgtttttgagactaggttctcatgctgccccagctgatcttgaactcctggccttaagcaatcctccagcctcaactcccagctagctgggattacaggcacacaccactgtgcctggctagatttaaggttttatcttaggattttatcctttttttgtttgtttgtttagagtcagtgtctcactctgttgcccaggctggagtacagtggtgccatatcggctcactgcaatctcctcctccccggttcaagtgattctcctgcttccatctcctgagtagctgggattacaggcacatgccaccacacccagctaatttttggatttttagtagaaacggggtttcaccatgttggccaggctagtctcaaattcctgatctcaagtgatccgcctccctcagcctcccaaagtgctagcattacagacatgagccaccgtgcctggcctgattttatctttaataagacattttcacagagcattctgcaattttttttttgaattgctttctgtgttaaagataacatcggttcctttgttatacatttaattatttgcatatttatactcggaaacattcttaaaagtatgaaatttgttatttcatcctatagtcagtttcattctttttcaactacgaaatattatctctgagtgaacttctagcttagaaagaaactctttcggccgggcacggtggctcacacctgtaatcccagcactttgggaggccgaggtgggcagatcatgaggtcaggagttcgagactagcctggccaatatggtgaactcttgtctctactaaaaataaaaaaaattagccaggcatggtagtgagtgcctgtagtcccagctactcaggagtctcaggcagaagaatcgcttgaacccaggaggtggaggttgcagtgagccgagatcgtgccactgcactccagcctgggcgacagagcaaaactcttgtctcaaaaaaaaaaaaaaaaaaaaaaaaaaaaaggaaagaaactctttcaacctgacactttctgggcatatatttatacccaaattctttttggcacaagtgtagcgctcatacgcacctggattggatgctggtgctatgtgatattatttggtgtatcctctggtatatgccaactaaacaggataattagaagataagtttgtgtcattacaacttttagttaaggcatatttatggggaaaatactacaatgaatgtataaatctttgatctgcgataaattatacttttgtctacataagcagtatcaattgaaggtttccttttaactctagtatctttgttacacatatatgtttaaaatactctctttatgtttctttaggactttttatgtctttccccactggagcttatgaaggtgactggtctgagttatcgaggtgtccatgaacttctatgtatggtcagcagggcctgtgccccaaagatgcaaacggtatatttatattttattatgatttgattatgaatgattcctcatctcattaaacatgtttttttagggatgaggcacatgcagaaatagagatgagtacctcaaaaatactgagttttctactatagaagttagttctctaaggaaaatacatgtgaaaattttttttttcttttttgagacgctctgttgcccaggctggagggcagttgcacgatctcggctcactgtagcctctgcctcctgggttcaagcgattctcctgcctcagcctcctgagtagctgggattacaggcacggtgctaccaagccaacttatttttatattattagtagagatgggatttcaccttattggccaggctggtctcaaacttctgacctcaagtgatctgcttgcgtcgacctcccaaagtcctgggattacaggcgtgagccaccgtgcctagcctatgtgtgaaaaatttatgtagtttataaactcatgggagacaatttctaaatatgggaattagggagcaacagaaagtttttatttttttttctatagccaatagcagtagttcaaaaggtcatctttctctgattgattaggtagtatttgatggcctcatagttaaattataatcttaattttagaatgcccctttctttgatatactgacctttaccatcatcacttgctctagatcataaagtacacataattgtacttgtagttgcttattgattgaataaaaggtaattaaaaatttatcctttactcttaagaaaatttgaagtcttttacaaaagccctcatcaaattgtacattttttcagactttttgtgtcatgactgtagcttttcaaaatgtagatttggagcatgatagaaatatcttgttttctcacagtaagagtttcctaaaattctgttcggtgctttgcaaatgtatttatttatgtggactgtaagtttcttaccttactgccttatattgaaatttactgaacactgaacaatgaagtacaattctctgaagaaggggagaaggaaggaatgttagtgtcactggaaacttctaaaaacaatgaacagatatttgaacaacagatattttctttcttttttttttttttgagatgaggtctgtctctatttctctggctggagtacggtggtgtgatctcggctcagtgcagcctccgcctcctgggctcaagccatcctcccaccgcagcctcccgagtggctgggactacaggtgcacaccaccatgcccaactacgttttgtgttttttgtagagatggggttttgccacatagcctagactgttcttgaacttatgagctcaagtgatcctcccgcctcggcctccccaagtgctgggattacatcagccactgtgcctggccaaacaacagatattttcttttgttcagatttagcttgtgatctgaggaaaatattttaaagacaggatagtcagaaggagaatcagaactggagttagaaactggcattagtcttagctttatcattgatttcattgcttgaacagctttcttttatgggagaaaacagaagttaaaatactatgcaatgattctgtgactagattcaaattaacttgttattattttgaaggttgtaaagcaccagaaaaacctttaatttgtcatctgtcattctaattagtcaatatccatggcatatttcccgttaataaatagagagcatggtcccgaaattcaactttaatttctacttccatcactaccttcagctgccatcttaatacaattccaaatacagttcaagaaaccatctttctcctatggtttacattcattcttgtagcattccttatatttcagcactgccctaaacactggcttagttttttttttttccaacttttattgtaagttccggggtacatgtgcaggatgtgcaggtttgttacataggtaaatgtgtgccatggtggtttgctgtatggatcatcctatcacctaggtattaagctcagcgtccattagctattcttcctgaagctctccctctcccccacaacctcgcaacaggccccaatgtgtgttgttcccttccgtgtgtccatgtgtccatgtgttctcatcgttcagctcccacttataagtgagaacacacagtttttggttttctgttcttgcattagtttgctgaggatgatggcttccaactccatccatgcccctgcaaaggacataatctcattcctttttatggctgcacagtattccattgtgtatacgtaccacattttctttattcagtctatcattgatgggcatttgggttgatttcatgtctttgctattgtgaatagtgctgcaatgaacatatgtgtgcatgtatatttataatagaatgatttgtattcctttgggtatatacctggtaacggcattgctggttcaaatggtatttctgcctctaggtctttgaggaattgccacactgtcttccacgatggttgaattaatttacactcccaccaacagtgtaaaagcattcctattagtctgcaacctcaccagcatctgttgtttcttgactttttagtaattgccattctgattggtgtgagatggtatctcattgtgattttgatgtgcatttctctaatgatcagtgatgttgagctttttttttctatgtttgttggctgcatgaatgtcttcttttgaaaagtatctgttcatgttcttagcccactttttaatggggttgtttggttttttttttcttgtaaatttgtttaagttccttatagagtctggatattagacctttgtcggatggatagattgaaaaaattttctcccattttctaccatgatagtttcttttgctatgcagaagctctttagtttaattagatcccacttgtcaattttgcttttgttccaattacttttggcatttttgtcatgatatctttgcttgtgcctatgttctgaatggtattgcctagattttcttcaaggttttgttttttttcctatagttttggattttacattcaagtctttaatccattttgagtcaatttttgtgtaaagtgtaaggaaggggtccagtttcagtttcctcatatggctagtcagttctcccagcatcatttgttaaataggcaatcctttccccattgcttgtttttatcaggtttgttgaagataagatggttgtaggtgtgcggtcttatttctgagttcttctgttccattggtctatgtgtctgtttttgtatcagtaccatactgttttggttactagagtcttgtagtatagtttgaagttggatagcatgatgcctgcagcttcattctttttgctttggattgtcttggctatacaggctcctttttggtttcatatgaattttaaaatagctttttaaaattctgtgaagaatgtgaatggtagtttaatgggaatagcattgaatctataaattactttgggcaatatggccattttcatgatattgattcttcctatccatgagcatagaatgtttttccatttgtttgtgtcctctctgatttcttggagcagtggtttgtagttctgcttgaagaggtccttcacatcccttgttagctatatttattgctaggtattttcttttctttctttctttttttttttttgagacagagtcttgctctgtcgccgaggctggagtgcagtggcgcaatcttggctcactgcaagctctgcctcctgggttcacgccactctcctgcctcagcctcccaagtagctgggactacagatgcccacctccacgcctggctaattttttgtatttttagtagagacggggtttcaccatgttagccaggatggtctcgatctcctgacctcatgatccgcccgcctcggcctcccaaagtgctgggattacaggcgtgagccactgtgcccggcccagtattttattttctttgtagcaattgtgaatggagttcattcataatttggctctctgcttgcctgttgttggtgcattggcttagttttagttcatttcttcaggaaattttttttgctcatttattcagtcatttattcttttgacctgtatttactgaatgtcaagcatgtattaggtactttgtcaggcaccaaggctatcatggtgaacaagtttatacagtccagccctcttgtagtttacagtctagtgggggaagccagacattaaaatattaattcagaaataattagttaattataatagtgctaaatcctatgaaggaaaagcataaggtactttgaaactttataatagggattacttagtttgggggtcaggaggacccttgcaaggaagcaatactttagctaaaacatgaaagatgaataggtgagagataggcaaaggagctgggaagggagatgggcagggaagagttattgggcgttgggtataacagatgcaaaggccctgggaagtgaaggagaatggggcttgcgtgagtgggtcataacaacgaagaagagagtggtaagagatgaagccagagaagtaagcaggagtcagattattagggctttgatttggactttattccaagagcaatggaaactcataaaagggtatactgtaatatgtgttttaaaaaaaatcagtcttggacatggacaagtgattgaaaaggagcaataaaatattcacgaagattagttaggtacctattactgtattccaaacaaaaagtgatggtgacttatattattaatgcagaggttatagtgttgattaatatgacagatatttaggagggataatttttgtttttttttgagacagagtctcgcactgttgcccaggctggagtgcagtggtgcgatcttggctcactgcaatctctgccttctgggttccagcaattcttgtgcctaagcctcctcagtagctgggactacagacatgcaccatcacacctggctaatttttgtatttttagtagagatggggttttgccattgtccaggctggtctcaaactgctggcctcaagcaatccacccacctcagcctcccagtgtgctgggattacagatgtgagccactgtgctgagcctaggagagagaattaatgggatttggtgattgtttggctgaggtggtggtgaagtataggaaaatgtcagagatgattctctgacttttgctttgagaaactgagtggtaccatttcctgagatcaggaatactggaagaggagcaggtttgagggaggcagatcatagattcaatttagtacttgtgtaatttttttttttttgagatggagtttcgctcttgtcacccaggctggagtgcaatggtgagatctcggcccaggctcccacgttcaagtgattctcctgcgttagcctcccgagtagctgggattacaggcacccaccactatgcccggttaattttttatatttttagtagagacggtttcagcatgttggccaggctggtctcgaactcgtgacctcaggtgatccacctgcctcagcctcccaaagtgccgggattacaggcgtgaaccaccgcccccggccagtacttgtctaatttaagatgtttataaaacatttagtgaagatgggaaataggcagttaaatatatggacctggactttgaaggcgaggcatgcacgtgggagtcattggtgtaaatatgatagttaaagctatcagaatggatgagtgattgcctataaagtgcatacagtaagacgataagtgtacttaagcctgaaacctgagtgatgccaacagttacaggtcagattagatgataatgagtctgagaagaagcagccaccgaagtagaagaaaaattggtagtgtcatatcacaaaactcttctttgtctcatttatatacatactacttttctgaagttttgttctgttagttcattttattcctttttttgagatggagttttgctcttgttgcccaggctggagtgcagtggcgtgatcttggctcaccgcaacctccgcctcccgggttcaagtgatgatcctgcctcagccccctgagtagctgggattacaggcatgtgctaccatgcccagctaattttttttttttgtatttttagtagagatggggtttctccatgtttgtcagcctggtctggaactccggacctcaggtgatacgccggcctcggcctcccaaaatgctgggattacaggcgtgagccaccacacccagctgattattctttttttgacttaccgaatctattattctagaaattacacttaaaattgtaagtgaagtgctttaattttgacagattgggctgcctttgcatgtttgagaaagtatccccacatgcatccacgttgcctgatgataggttatagaaaaaaatgtctacgtaaggatgccgactgaaatatttcttatatcaaaaaattggaaacaataataataggaaggagataaattatattacatttatgttagggaatattatgtaggcactaaaatctttaaaaaatatttgtttgtttattgatttttacagaggcaaggtcttgctatgatgcccaggctggtcttgaaatcctggctgcaagtgatcctcctgccttagcctcccaaagtgctgggattacaggcatgagccatcatgcccagccaataatttttaataacaggagaaatgcacaggatataaatggttagtgaaaaaagcaggctacaaaattgtatatagtatacatgccaattttataaaaatgaccgttataaaggtatttggtgtatattgttaataatggttatctcaggattgtggaattttttactgttctgttttctttaactttttttttcattccaaatttgctttaggtatgttatgttctttaggaaaaaagcagcaacagttcttgtttgtccccttgcagtaatatctggcaattctcttagtctcagtttttttaccatttgcgaaatggagataattatacctgtgtgtaaatgaaataatgtatgtaaagtacttaatacagcacatagtagatgtgcaacagatgttcattagcttcctgtccttgccttttccttactgttcatgattcctgaatcacagcaatatctaagaggagctgatgttatttgctccatatcctagcatagtgactggacagtgccctggagcaggcaaaactaaactgaaatgtaaagcagaccattaacaaagggaggttgtcaaaagcccttaaaagaataaaaggaacattagaaaataaacatcttttaaaaatcaggtaaaattttaatatcccagaagattaataaaagtaattaaaaaaacaattttccttatagagtattaacttttgtagttctaaatacatcagaatgatcaaaaccaacaaatgaaatcaccagaattctttgtataatttcttgtggacaaacacaacaccaaggataagaaaggagaatttcgggccaggtgcagtggctcacacctgtaatcccagcactttgggaggccgaagtggtcaggtcacttgagggcaggagttcgagaccagcctggccaacatggcaaaaccccgtctctactaaaaatacaaaaattagccgggtctggtggcaggcacctgtaatcccagttacttgggaggctgaggcaggagaattgcttgaacccaggaagtggaggttgtagtgagctgagatcgcatcactgcactccagcctgggtgacagagtgagactctgtcttgaacaaaaaaaaggagaatttcagaattgtattatattggaaaaacttcagatatgtagtgtttctccccttgttcacagggaatatgtttcaagaccctcagtggatgtttgaaaatttggatagtactaaactctatgtatactatgttttttggatctgataactgagatgataactgagatactgactaatgggcagggagtgtctacagtgtgtatacacttggcaaagggatgattcacatccaggtgggatgatgtgagatttcaccatgctactcagacctgtgtgcaatttaaaacttatgaattatttctggaattatccatttaatattttcagatcaatgttgaccaggggtaactgaaacatgggaagtgaaaccgtggataagggggactgttgtactgtgtacctgggtttagatatagttgctagtaccaaaagtttttatccccactactattaccttcttctagctaccattatttttctttggaatgactgtaacgtcttcctgacagatctcccagcttcaagctgttcttcacaaactaatctgagtatgtctttgaaattataatttgttgtattagtttcctgtggcagttctaatacaaatcacaccctgggtggcttcagacaacagaaatttattctcttacagttttggagttcagaggttcaaaattaaggtgtaggcagagctgcattctctccagaggttctaggggattatccgttccttgcctctttcagcttttggtggccattaacattccttggcttgtggctgcttctctctctataccatcttcacataaccttttcctgtgtgtattgaattccctctgcctctcttattagtgtgggtatttagggtccatctggataatccatgattatcccttcatctcaagagctttaacttaatcacatctgcaaacacccattttgcaaataaggtaatattcacagacaggttctggagatttgatttggatatccaggggtgggggtggggggtcatttctcagcctaccacaccttccttcacactgttcttcacaaacgaacccaagtttgaaataacttgttcatgtcactcctttttgcatcttcaacagagctgtttatggttaggcccctgcttacttctctagcctcattgcttgctgtgctacacccacactccatctttcaaccattctaaatgaactgtatatttacagtttgtgttagtccctgtttcctctcttgcttcttgacctttctttgtacattctgtcctctttggcaggaatagtcaaatttcctttgcttacctaacagctctttcagattttagcacgggcatccagcaattccattaagtttccaaaatctgtatcagttatactttccctattacaatatctcttattaattgtgttgtaattgcctggtttctagtcctaatttcatagtccctggttgacttcataagactgtgagggcaacgtctctctctttctgttatgtcatatccccataatctagcacagtccctggcacagagtaaatatttgttgaacaaataaataatagaagggaaaaggatggattagggttaaaattgctaaaatttagagaattaaagttggtttatgtttttgaatatatatagaggttgaaaaaaaacttaatcattttcttgtttaggcttatgggataaaagcacaaaggtctgctgatttctcaccagcattcttatctactaccctttctgctttggacgaagccctgcatggtggtgtggcttgtggatccctcacagaggtaaaggaaaaatttttcgtaccttcttccattgacctataaccttcagagctagggaaaaagtttagttaaaaaacataaattatttctggaacggtaatctgaattaaattataagtacttcaaggatatggttctccactcagtacttagtgtggttgttctgcaaacagaggtgttaaaaacaaaatccttgctgactgattaaaatctacttaggttgctgtttcattgagttaacttagaaagtgataaatattgctgggtgtgtttatatatgtgttatatatataatgcatacatatatgttatatatacatacatgcatacatacatttatatgtacacacgtcacatatatgtaatatatacacatatgtcatatatgtaatatgtatgcacataaataacattatatattttatatatatgattatatcatgcctgtaatcccagcactttgagcaacaaggcaagaccctgtctttaccaaaaaaaaaataaaaaaaacccagaaaccatttagccatatgtggtggtgcatgcttatggtcctagctactcaggaggctgaccttgagccagggaggtcaaggctagagtgagccatggtcacaccactgcattccagcctgggtgacagagcaagaccctgtctcaaaaaaaagaaagtggtaaatattatgaaataatattatgaaacaattgggggaattaaaaaaggatcactccttataaattaggaaggacaatttgaaattttattaacatatggaaaaattatagtattaaactaaagtgagctgtttttactttctgttatagataaaatttcttttaggaagtgataggttattggattagttaatactgttggataacaaattatcccaaaactaagtggcttaaaacaataaactttggttatttcttagtttctttgtgagtggcttagctcagcattgttggtgagggatgcagtcatctgaagcttggtaggggctgtaggatctgtttctgaggggcccacttacatgactggcaaatgggtgctggtggttggcaggaggccacagtgcctcaccaggtaggctctccacaggcttcttgagtcttatgacatgatggctgacttcccccaggtgagtggtcttgaagaaggcaagatggaagtggtgatatctttggcaacctagctttggaagttacacaccactacttctgccacttttcgtcattagaagtgagtcattaagtcaagcctacatttaaggaaagggaaattagcctcttttttttttttttttgagacagagtcttgctctgttgcccaggctgaagtgcagtggcacaatcttggcttactgcaacctctgcctcccaggttcaagtgagtagctgggattgcaggcatgtatcaccatgcctggctaattttttgtatttttactagagatggggtttcaccatgttgtccaggctggtctcaaactcctggcctcaggtgatccacccacctgggcctcccaaagtgctgggattacaggtgtgagccactacacctggccaaccttttggaggaagaagtgtcaggaatttgaggacattttaaaaccactgcagttattttccttgaaaactgcttacaatgtggtgacttcatagacaatgtttatcaatacactcctgaggacttcttgcttgaaagttctaggggcataaatactttcaggaaacttctaaacaagaacagattattttcttacattctgatagtcataatttaactgtggattttttttccttggagatagggaccctgttttagatactatattttatttcctgtcttccaagagagatttaaagatttatatgagcaacacctagcagatgcctattaaatagttggtaaataaatgcgtgaattagttattaataaaaatgcacacacacacatacacacacacacacgcacacacacacacatcctcttcttttggaatatactgccaccaggtggtgccagaatcacatgattttacataaactttttgggctgaagttccacttgcttaaacaaggtttattacagtgtgatccacagtcataaacttacttatttaaatagcaaaaacattgaacttaaggaagattaactgggaaattctttttactttttaagttttagaataatttttaatactttttcacttagcttttattaattattttttaaaatccaaacagaagttacaagccttttaggtgttttgttgttatctaattggctgacttggaataggaatataaatactttgactccttagtaggggcaaattctctcctttctgttctagctacaggtagcttcttcaatcttttttgttttttgtttttcaactgagtacagggagtatatcaaattatcctcaaacagagttttttttgcttttattacaatttttaattgatacaataattgtatatatttatggggtacagtgtgatattctgatatgtgtgtgcaatgtataatgatcaaatcaggtaattggcatatccatcacttcaagcatttatcattttttgtgtgtgttcggaacatccaaaagcccctcttctagctatttgaaaatatataataaattgttgtaaattatagtttacctaaggtgctatagaaaactaagacttattcctcctgtcttgctataattttgtaactgctaaccaacctttggctgtctccctctaaccatctcagcctctaataaccactattctactctccacttctatgagatcaatttttttagcttctacatgtgagtgagaacatgcaaggtttgtctttctgtgtctgacattttactcaacataatgaccttgagttccatccatgttgttagagatgacagaatctcattcttttttatggctgaaatagtactccattgcatgtatgtaccacatatttatccatttgtctgctgatggacacttaggttgattccatctcttgggtactgtgaatagtgctgcaataaaaatgggagcgtagattgacatactgatttcatactgtgtatcatacatgcgcatgcacatacacacatgtggaggtaagagagagctagcaaaacgataaagtaaattgggcaaaatgttaacggtgggtggatgtgggaaaagaatgcatatatatattctgtattgtttttatttatttttaatttatttttattttaaattaaaaaaaaagatacatggtctagctgtgtcacctaggctggagtgcagtggcacaaccatagctcactgcagcttcaaactcctgggctgaaatgatcctccttcctcagcctcccaagtagctaggactacaggtgtgcaccaccatgcctggctaattttttaaaatgttttgtagagatgagggcttgctatgttgcccagactggtcttgaactcctgacctcaagtgatcctttctgccctggcctcccaacgtgttgggattacaggtgtgagctactgcgcctggccttctgtttttattaataccattttcctgtaagtttaaaattatttctagataaaaaagtaaaaaaaaaaaaacctgtgatgtttgctgtaagtagatatccttgatcagaaataaagaactttcctccatttcctagctaaaatactaatttggtgttacattttatcaaaaacttttttttctgcattgattgaaatgattgtattatttttcatctttggtctaatagcatggtgagaaacatttaatagatttttctgatgttaaactactattgcatttttgggacaagttcaacttggtcatgatatattatctttttttataaactgttggattcagtttgctaatatttaagatttttcaatatttaggatggatattcagctgtaattttccttttagtagtgtctttgtctgaattagtatttatcttatactagtttggtagaatggattatggaatatctctttttttaatattctgcaatagtttgcctatgatgggaattatttgttccttgaagatttggtagaacttgtctgaaaaattgtctgatcttgatatttttccttctgagaagattttttaaaaattcaattcctttaatgattataggactactcagattttctatttcttcttgattagttacagtgaatgagatttttaggaatttgtccattttctttatgttttcaaatttattataataaagttattcattacaatcttccagctcttaaatctggttttacatgtggtttttgtccccctttccatttctgatattacttactttgttttatttctccctctcttttaaaaaaaatcttgtcagaagtttgagtatgtatgtcatcattttaaagaactctgcattttgttgttctttgttggtcttctctattatttcttcatcttctacctcctttatttctgccattttcttattatctccttttatttaatttttttgtggggttattctttgcttctaacttcttaaattagatatttaatctattaattttcagtttttctttttactctgaccttttaagactgaatttttcttgaagcattctattttgagatatagtatttccattttcattctgttctagaagtatttaaacattcccatcacaattgcttctttgactcatgtatcatttggaattttaaaatatctaaattacttaattaaaaaaatttattttaattacattattaatctaattgcatttttgtcagataactttgcatgatattgattttttgaagttccctgagacatcttttaaggttaaatatgtgatgaactttgataaatgttgcacgtgtgcttgaaaagaatgattattctctaataattgggtgccctattttattttaggttcagggggtatatgtacaggtttgttacattggtatattgcgtgatgctgaggtttggggtacgatttataccatctctcagctactgaacatagtccccaataagtagtttttttagcctttttccctgctcccttcttcctccttctaataatctccagtgttgattgttcccatctttgtgtccatgtatacccaatgtttagctcccacttataagtgagaacatgcagtctttggttttctgttcctgtgttaattcacttaggataatgaccaagagctgcatccatgttgctgcaaaggacatgattttgttctttttatggctgtgtagtagtccatggtatatatttaccacattttctttatctactctaccatggatgggcacttaggttgattccatgtctttgctattgtggatactgtggcagtgaacatacgagtgcatatgtctttttggtagagtgatttattttcctttgggtatatatccagcaatgagattgctggctcaaatggtagctctgttttaagttctttgggagatctccaaactcctttgcacagtgattgaactaatttatatttccacctacagtgtataagcattccattttctctgcaccctttccagcatctattattttttgactttttttttttttttgggacagagtctcattctgttgcccagcccggagggcagtggcacttttggctcactgcaacctctgcctcccaggttcaagtgattctcgtgcctcagcctcctgagtagctgggattacaggtgtgtgctaccatgcccagctaattttattttttagtagagatggggtttcaccatgttggccaggctggtctcaaactcctggcctcaagtgatccgcccacctcagcctcccaaattgctgagattataggcatgagccactgtgcctggccattttgacttcttaataatagccattctggctggtgtgagatggtatctcattgtggttttgatttgcatttctctaatgattagggatgttgagcattttatatttgatggccacatgtatgtcttcttttgagaagtgtctgttcatgtcctttacccacttttaatggggtcattttttgcttgttgatttgtttaagttccttatagaatctggatattagacctttgtcacatgcctagtttgtgaatattttctcctattctgtagggcgtccatttattctgttgatagtttcttttgctgtgcagaagctctttagttaggtaccacttgtcaatttttgtttttgttacaatatttttgaggtcttagccattagttctttgccaaggctgatgtccagaatggattttccttggttttcttctaggatttttatgggttgggtcttagatttaaattgttgatccatcttgagttaatttttgtaaatggtaaaaggtaggggtccagtttaattattctgcatatggctagctggtaatctcagcagcatttattgaataggaagtcctttccccatttttttattttcgttgactttgtcaaagatcagaggttgtaagtgtgtggtttcatttctgggttctctattctgttccattgatcactatgtctgtttttgtaccagtaccatgccgttttggttgctatagtttgaagtcaggtagtgtgatgcctctagctttgttctctttgcttaggattcccttggcttttcagactcttaacttcccatatgaatgttagaatagttttttctaattctgtgaaaaatgacattggtaatttgaatctgtacattgctttgggaaatatgccattttaacggtattgattcttcaaatccatgagtatggaatgttttttcatttgtttgtatcatctatgatttcttgtagcagtgttttgtagttctccttccaaagatcgttcacctccttggttagatgtattcctagatattttattttttttgtgtagctattgtaaatgggattgtattcttgacttggctctcagctggaatgttattggtgtatagaaaagctactgatttttgtgcattgattttgtagccttcaactttactaaagtcatttatcagttctgggagccttttggagcagcagtctttagggttttctaggtatagaatcatattgtcagtgaagagagatgattttgctttttcttttctattttgatgccttttatttctttccctttttgagatggagtctcactctgtcgcctaggctggagtgcagtggcacaatcttggttcactgcaacctcacctcctcaccttctcttgcctcagcctttcaagtagctgggactataggcgtgcactaccactcccagctaatttttatatttttagtagagatggggtttcaccatattggccaagctggtcttgaactcctgacctcaagtgatctgcctgtctaggcctcccaaaattctgggattacaggcatgtgccaccgtgcccagccttatttctttctcttgcctgattgctctggctaggacttcctgtactatgttgaataggagtggtgagactgggcatccttatcttgttctagttctcccaaattttgcctgtttagaatgatgttggctgtgggtttgtcataaatgggtcttagtattttgaggtatgttcatttcgatgcctagtctgttgagggtttttatcatgaaggggtgttggattatgttgacagctttttctgtgtctatggagatgatcatatggtttttactttaaatctgtttatgttgtgaataacatttattgatttacatatgttgaactagccctgcgtctcaggaataaagcttacttaatcatgatgtattaactttttgatgtgttgctggattcagtttgctcatattttcttgcagatttttgcatccatgttcatcagggatattgacctgatgctttctttttttttttctttttttaaaattttattattattatactttaagttttagggtacatgtgcacaacatgcaggtttgttacatatgtatacatgtgccatgttggtgtgctgcaccaactggtcattttgcattaggtatatctcctaatgctgtccctccccccctcccccacaatgctgtcttttacattgtgtctctgccagattttggtgtcaggctgatactggtcttatagaatgagttattgaggagtccctcttcctcagttttttggaacattgtcagtaggaatggtataagtgcttctttgtacatctggtagaattaggccgtgaacatgtctggtcctgggatttttctgcttggtaggctttttgttacttaattcaatttcggacctcattattggtctgttcattagtttaatttctttctggttcaattttgggaggttgcatgtttccaggaatttatgcatttcttctaggttttctagttagtgtacatagaggcgtttgtagtagttctctgagggttttttgtatttctgtggggtcgatggaatatcacctttgtcatttctgattgtttatttggatcttttttttttcttattagtctagctagcagtttatcttatatattctttcaaggaacaaactccttgattctttgatctttttaattatttttttttttgcatctcaattttgttcagttcagctctgattttggttatttcttatcttctgctagctttggggttggtttgctcttgcttctctgtttcctctaggttagatgttaggttatttacttgagaacttctgaactttctgatatgggcttttaacagtataaactttcctcttaacactgttgtagctgtgtcccagagattctggtatgttgtatctttattctcattagtttcaaagaatttcttgatttctgccttaatttcattgtttacccaaaagtcactcaggagcaggttgtttatttccatgtaattgtatggttttaagtgattttcttagtattgatttctatttttattgtgttatggtccaagagtgtgattggtatgattgcagtttttttttttaatttgttgactattgttttatggttgattgtgtggtcagtgttagaacatgtaccctgtacagatgaaaataatgtatattctgctgtttttgggtggggagttctgtagatgtctattaggttcatttggtcaagtgttgagttcaggtcttgaatttattagttttctgtcttaatgatctgtcttataatgtcagtggggtgttgaagtctcacactattattatgcagtctcttcataagtctttaagaacttgctttatgaacctgggtgctcctatgtttgctgcatatataggataattaggtctttttgttgaattgaatgctttaccattatgtagtgcccttgtcttttatatatatattatatatatatattttttttattatagtttaagttctagggtacatgtgcacagcgtgcaggtttgttacatatgtatacatgtgccatgttggtgtgctgcacccattaactcgtcatttacattaggtatatctactaatgctatccttccccgctccccccaccccacaacaggccccagtgtgtgatgttccccttcaaaaatgatgagttcatgtcctttgtagggacgtggatgaagctggaaaccatttttgtctttttttatctttagtggtttaaagtcggctttgtctgttataatagcaacccctacttttttctattttctgtttgcttggtagatttttctctatccctttattttgagcttatgggtgtcattgcatgtgaggtgggtctcttgaagatggcacaccattgggtcttgactctttgtccaacttgccactctgtgccttataattggggcatttagcttgtttacattcaacgttaatattgacatgtggatttgatattgtcatcatgttgttagccggttattatgcagacttgtttgtgttgttgctttatagtggcaatggtctatgtacttaagtgtgtttttgtagtggctggtgatggtctttcctttttatatttaacactcccttcaggacctctcgtaaggcaggtctaatggtaacaaattcccttagcatttgtttgtctgaaaaggatcttatttctcctttgcttagtttggctgcatatgaaattcttggttggggctgggtgtggtggctcacgcctgtaatcctagcactttgggaggctgaggcaggtggattgcttgagcccaggagtttgagaccagccggggcaatatgatgaaaccctgtctctacaaaaaatgctaaaattagccgggtgtggtggcatgtgcctgtagtcccagctactcaggaggctgaggtgggaggactgcttgggcccaggaggtcattgctgcagtgagccatgatcatgccactgcactccagcctgggtgacagagtgaaaccctgtcacatatacacacacacaaaaaaacacacacacgaaattcatgattggaatttctttaccttaagaatgttgaatatagtcctccaatctcttccagcttgcagagtttctgctgaaaggttcactgttcgcctgatggagtttcttttgtaggtgacttgccccttccctctagctgcctttaacatttttttccttcattttgactttgatgaatctgatgactgtgtcctggggatgatcattttggatagtatctcacagaagttctctgcatttcttgaatttgaattcaggcccccagctttgttctctgggcccttcaggttaggaaccttctgtgctggaggagcccaggtgttcttggatctctggccacaacactgatgtgtggtgccagccaaattgcgttgttggggtggtggcagtgggatctgtgcttgttcacatgtaccaacagcagctgcgttatggtgggatgcacactccatggcttggatggggtgctggtgggtgcggcgctgccagcctctgtgtgcatattcatactggtggtggtgttggcgcatggggtagtgcggtgctggcaggtacagggctgccagtctccatgtgtgtgttcgtgctggtggcagtgtggggggtggcgtgtgggttgctgtcctccgtatgcgcgtttgcagtggcaatggccacgcagtggtggggttacactctacaccacagctgtggcatagtgggatgcatatgcacatgggtgccagcgatggaggggaggtgaggtctacccacacgtgtgccagcaaaacggtagggcaggtgggggcgtggccgagtgcatgttcctgctggcaaagcagcacagaggaggctgcagtcagtggtggtctggtgtgcctcagtggaggctgctctactggagctcttgatggtcagcattatctgccagtgaaggagctatgatgtaggccccctggaggcacctcagttgggcatccgagggtacactgcaagtgtgctccaccaggttgggaccctgggagaggccagcagacaaggggtgctttgattggactggctccatttcacatgcaagaccaccatgatctgttcagatttgacagttctcctaaggctaaagtctcctaggagagcatggtgagccttgggagatggacaaccctggttgtgctccactgcagacattactgcaccaaaccctctgggttccacactgcattcctacccctaccacctctctaagcacctctcccagccagctcaggtgtccacaccctggggtcgtggggtctcctgctgctaggatttcagaggtctgtggtgagaggggtttgtttttcacctcttcaactcaccccttcctcaggagtccttgagggccagaagtaagtcttggtgtgtgatagcccaatgcagggttcccagtttcttctttcttcagcccagcatctatatcctccctccatccattctcattgccttccctccaaagatctcagaatgtgccagtcttcccaaagtcccagtcacttggtggcatgtgttcctcctggctgcgtctagttggccatcttgccccagggtcttctctctaattttaggcatttattttcttctgctagttttggggttggtttgttcttttttttttttttttttttttctaattccattaggtgcaaagttaaattgttaatttgaaatctttctaacctcttgatgaagaaatttagtgttataaactttcctcttaatactgctttagctgcctcccagagattttgggaagttgtgttcctattttcattaatatcaaataattttttgacttccgccttaatttcttgttcacccaggagttattcaggagcaagttgtgtcctttctatatttgcgtagttttgagagatcttcttgatattcattttaatttttttggcactgtggtctgatagtgtgcttgatgtgatttcgatttttaaaaaaatttattgacacttactttatgaccaaacatgtggttgctcttagagtatgtttcttgtacagttgagaagaatgtatattctgtggttggtgtgtggatcgttctatagatatctgttaggtttaattggtcaagtgtcaagtttaagtccagagtttctttgttatttttctgccttgatgatctttctgtcactgtcagtggggtgttgaagcccccccccatttttgtgtggttgtctaagtctttttatcagtcaagaagaacttgttttatgaatctgggtgctccaatgtttgatgggtatatatttaggatagttaaatcttcctgttggattgtacacttttttgttgttgttgttaagatggagtctcagtctgtcaccaggctggagtgcagtggcacgatctctgctcactccaaactccgactccttggttcaagtgattcttctgcctcagcctcccgagtagctgggattacaggcacgtgccaccacaacccaactaatttttgtatttttagtagagatggggtttcaccatgtcggccaggatggtctcaatctcctgacctcatgatctccctgctttggcctcccaaagtgctgggattacaggcgtgagccaccacgcctggctggattgtaccctttatcactgtgtaatacccttctacgtctttcttagtcgttatggtttaaagtctgttttatctggtataagaatagtgacttctgcttgttttccatttgcctgctagctctttcttcatccctttttactttgagcctgtgggattacatgtgagatgggtctcttgaagacagcagatggttgagtcttgtctttttttttctagcttaccattctgtgtcttttaagtggggtgtttagaacacttaacattgaagtttagtaatgacatatgagactttgatcctgtcattgtgttgttggctggttgttatgtagacttgattgcgtagttactttatagtgtctgtgggctatgtacttaagtgtgtttttgtggtagcaggtgtcgttcttaccattccatgtttagcatttcctgaaggacctcttataaggctgttctagttgaaacaaattccctcagtgttttcttgtctgagaagacgagataaatttatttatttttcacttatgaagcttagtttgtgggatatgaaattatttgttggtatttcttttctacactgaaaataggtccccactctcttctggcttgcagtttctgctgagatgtctggtgctagcctgatggggttccttctgtccatgcattaccattctctcttgcttccttcaagacttttttcttttgcattgacctcgttgaatgtctgtgtgcctttgggatggccattatgttgtctggatttcttgtacctggatatctacatctctagcaatattagggaaattttcttgaattattccatcaagtatgttttccaggttgtcaactttttctcctctctcaggaatgccagtaattcataggtttggttgctttacgtaatcccacacttctcaaagactttgttcattttataaaattctttattctttctttctttttttttctttttcctttgagatggagttttgctcttgttgccccagctggagtgcaatggcgcaaactcgactcactgcaaccttcacctcccgggttcaagcaattctcctgcctcagcctcccaagtagctgggattacaggcatgcgccaccacacccagctaattttatattattttagtagagatgggttttcaccatgttggtcaggctgatctcaaactcctgatctcaggtgatcctcccacctcagcctcccaaagcactgggattacaggcgtgagccactgcacctggcctaaaattgttttttcttgacttttgtctatatgtgttagtttgaaatatcagttgtaattatttttttctgcttggtctagtctgttgataaaattttcaacagcttggcaatcataaagtgaagttttcagttccagaagctctaattgattcctttttaagatgtttatctcctttttcatttcctggattgttttattagattctttgtgttgattttcagtcttttcttttatatctttgagtttcttccaatccatgctttgaattatttatctgacatttctgagtttccattttggttggggacctttcctagagagctactgtgattctttggtggtgttacaaaaattggatttttctggtgccagcattcttatgttgcttccttctcatttgtaggtgttggcacttctaaatttttgttttttgagacaggttctcactcttttgcacaggctgaagtacagtgaatcatgtcccactgtagcctcgacctcccaggctgaagcaatcctcccacctcagccttccaagtagctgggactataggcgtgtgccatcatgcctggctaattttttaattatttgtatagacagtgtcccaccgtcgtcttgaactcctgggctcaagcaatcctcctgctttggcctccagggttggagtgctgggatggattacagacatgagtcaccgtgcctggctggcacttcaaatttttgtagatattttcatgcaggtagggttttctttccctttcttttcttgtattattattgttttttccccctttccttcccccactcactaaagggtgtgacttaagagtatgtcgagtagggtcttttgtctttgtttccatggccttctgttctggcagcaggttgtatattgggctgtggagttcaacctacgggccagtagatgatgcttacgggtgagagtcagctgtggtggaagcagacagttatgtacttggtatttgtttactgtgaagaactctctgttgttccaggtgataggctagactgtggagggctgcataccatgtacttcctattttacgggagtgctggggacatagctgggtagagtggataacctggcttgtccacaaatacccctatgtcaaatgtagaagtgtagtccccaaccctgatgagggtggctaggaaaagctcccagtgaattgtgccacagtctctgtgggggtttggggtgctacacaagccccttctagatagactggaatgtagattgttgcccagtcacacccttgttctagagctcttgactcctggatcagacacacactgcagcctatctccagaccaccatgtggttgagagccttaggaaatgtctaatttttgactctccaggggagtggtttttggggcagaacttcatcacttagcttaatataggtagctgtgtggctcctctgctctccaatgtgatgactcttcttcatttaagagcggggttgggggactccttctttgggcctctgcaggggtgtgttggttttggtggtgttggctggttgcgtcggttcaacctcaggcaatgggagatgtggtaaagtactagcaaaattggaatagggtagggagatctgtaagtccctagttagtccctagatggctggctggacttcctctatgagtcttgatggggctggattgttggggagcctcaggtcctggctgtgatgggaaggggtgagggctgatatctgggtgaggggctaaactctcaggcagggcacttaggcggtgggagccctagggaagatcacaggtctatgggggtaaggttttcgacagggctttgggccatgactgaaatgctcatgtaggggtcggctatgtgcagtagaagccagaaggcagcagtcctggttggggagtgggcagtggaggaagggggtcatgtggaaagcattctggccacctctctgaagggtagctgctggcactggagtttctctccccagcctgggggcagcaggggtggccacggcagaggacctgttcagttgcctttgggagtgatggtgatggggggtgtacctgggaagagggaatggggagcaggttgggtactcctctctgctgatggaggtgcttgaaagcacctttgttccctccctagcctagaagtagcaaggatgggtactgcagcagctgcagtggcagagggcctgtcagttgcctttggaagctccaccctagagaaacagagctgctactcactgaagtgattatgtgggggtaggggtgcctgtgctggcggcccaagtcaggaggccctgccctgtaaggagcagcaggggctgggcctctgagagcaaagagtctggccacctttcctgaaggcagctgcatcctgctggaggtctacttactctcaaggcagctgcatcctgctggaggtctacttactctcaggctcttcactccctccccagcctgagagcagcaggagcaaggacctgacagaggcagttgcagtgggcctgtcagttacctccgggagctctgacccagtgaaatacagagccagagccgtgaccgactgaccagagtgctcagttggtggtggagtgggcgtgctgggggcccaggccagtggccttgcctggcaaggaacagcagaggcagggcctgcagtctgactgctcctaaactccatggatatggcttctatcctagagctacgcgaaaaaacctggcctcccttggtgggactataacagctggcaccagggaactcggggatccaaggttggtggggatccccgactccatgtggggttgagcttccaagaagtcttccttacatggcttatatggctgggaagttggtcctggctgttggcagttctttgcgatgtgaacctttccataggactgcttgagtgtcttcatgacacaacagctgactttctgcagagtatgtgatccaagagtacagggtagaaatgacaatttctttttaagacaaagccttggaagttacataccatcatttctgcagtattctattagtcacagacaaacctgatacaatgtgggaggagactacagaaaggcatggataacaaaggtgagcatcattgagtcttagaggccgcctaccactgatatatgcatgtgtgtaaacatatgtacgcatgcatgtgtgtatgtgtataattaaaaaaaaaactttatgaccattctgttctcagaaatgttgtagtaggcagaatttcttaaatggcctctcaaagatgttctgccctaatccctggaacctttgaatatgatgagatgtcactcccatgattattatatgttatatggtatagttgactttaagatggggagattatttggatctaatcatatgagcccttagaagtagtgagctttctctggctgttaaaaaggggaaggaagaaaagcttaaaacccaagaaggactcaggatgccattgctgccttgaaggtggaggggccatgattaaaggaatgtaggcagcctctagaagcagtgagtggccctgagataagagcaagaaaggaacctcagacctagagctgcagagaaatagatttttgccaacagcttgaatgaacttggaagttgattcttactcccaacctccagataagagtccagctcagctgagatcttgatttcaaccttgtaagaccttaagcagagaacctagccaaccctatctggacttctgacctgattgtctctgatttatcctctgctgcttctgctttaggaatgaatagcacttctctacttccacttttcatcttggtgttgtaactgaatatataagtatacccagattcagtgacattcacataagtcaaaactgacttgcagtgacataataaatggatgctgttcaagctgccaagtttgtggtaatttgttatgaagcagtagagaactaataaaatacaggtgtcagtgaaggtgcctaattaactgcattgcacagtctttgtttctggttaaaaggtcaagcctagtgtcctagatagatgtcagatagatctggtgggtgggtggggtaaggcaactgattgaatgaacttagagtggatctggagattgagagagtaagaatcaatctggaaatattttgctgtcatttttatagtttctctttcctgactttaacttaaaaatttcctaggttatttatcatcagttttgacttacgtgaatgtcactgaatctgtgtatgcttacatattcagttacaacaccaacatgaaaagtggaagtagagaagtgctattcattcttaaagcagaagcagcagaggagaaatcagagacaccaactctgcggacctgctgaaggaagtgaactacagggcattgttccattccctgagaacagcaaacaccttaaagtttgtattatgtggagatcaaatcagttcggtagccttctcatatgagataatatagatcagtgttcctcattcattttttcattattgtctcctaagaagcctttttaacaattttttcttaaccacaccctccaatgaagtttttctaccacacatatactgtatatctgtttttgtactgtataaatatctgtgctttatacataaaagagtaaaatcttccccttcctccaaaacaacttttacccttggggttaatattacccatgctgagaatgcataagatagatgctattgtgaataggtaaaattaaagttatatttaaagatacaggtgaggtgcagtggctcacgcctgtaatcccagcactttgggaggccgagatgggcagatcacttgaggccaggagtttgagaccagcctgcccaacatggtaaaaccccatctttaccaaaaatacaaaaattagctgggtgtggtggcatgcgcctgttgtgccagctacttgggaggctgaggcatgagaatcatttgaatccaggaggcagaagttgcagtgagctgagattgcactactgcactccagcctgggcaacagagtaaggctccgtctcaaaaaaaaaaaaaagtattcagagatatcatcaaaaaaggtattttcagctaggtgtggtggctcatgcctgtaatcccagcactttgggaggctgaagcagaaggatcgcttgaggccaggagtttgagaccagcctgagtaacatagcaagaccctagctctacaaaaagtaaaaaaaaaaaaaattaggtgtggtggtgcatgcctatagtcccagctacttaggagactgaggcaggaggatcacttgagccaggagttcaaacctgcagtgggctatgcttgtgccactgcacttcagcctggggtgagatcctgtatcttaaaaaactattattttcatactgtaatataatctagagtacaggaccagagaactcagttcaacacagagagatgtaatatctgcatagttattatgcctggcaaagtttttgtatttttagtagagatggggtttcaccatgttagccaggatggtctcgatctcctgacctcatgatccacctgccttggcctcccaaagtgctgggattacaggcatgaaccaccgcgcctggccagcatcttagttttttcttggaacaattactattatagttcttttttttttgagacagagtcttgctctgttgcacaggctggagtgcagtggtgcgatctcggctcaatgtaagctccgcctcccgggttcatgccattctcctgcctcagcctccccagcagctgggattacaggtgcccgccaccacgcttggctaatttttttttttttgtatttttagtagagacggggtttcactgtgttagtagccaggatggtctggatctcctgacctcgtgattcgcccaccttggcctcccaaagtgctgggattataggcttgagccaccgcacccggcctattatagttctttttataattggcaggattagctgtggcctacatgatcacaggaaataataaggcaggggttgtaaactcaaatgcctataagcacgagccatgtaacagaagtacatgaaacagttaagtgtaagacatagatatttattagttgattttagctgctgacaacagcagcaaacatttatttttttgctcatgggtctccatgtctgcaaaggtggatcctgtcttcttcaggctgcagtgaggttcagatgtgccccacaagttgtaacagcagcaggaaaaccagagagagatttcaaatggatgttccttgagtacagtctgctgacattcatttatcctgccctatgttttgaaaggcagataactaggcctctgttctaatacagacatttagcatatgcggttgattggaccattgttcccaattcttcacttactctctaatttagaaataaacattctgctctgtaatggtttactagagtcttttatgtggcacatgttcaataactgctgttaaatgaatgattatatcccttaatactgtttgatttttgttaatggtggaacttggggtacttgtcatttccattccctcctgctttttctgctcttttcccatccctactcttcctctctcccttcccatttacttccaaaacggcagctgtcaatatgaaaaaggagggagtggtagagagaatccaagacataaactcttccacatgttggtgtaaagtaatttaagatcaaggtttctttcacaaggcaaaatgcaatgcaacctggcctttctgagattctttttttttttccttttttatggttttggctttaggatttagaatgttagttattttaaaaatgaattttgtaggtctgaagacctactcatatttctacataattgttgagcaaacggagacaagtagttagatgctggaggtcattaaaaaatattttttaatgaagcttttttaaaacatgctcactggtttcagatcagagccaggcatccttaaattgtcttctgccaggtattggcttggcagattaccctgtccagttgccctcatcttgaatgtgaggagagttaacttgataagattttaggtcctaactggaccagattttacattcctctcagccatgaaaagtttaagatgagcaggcttcatttttactttagtacaattagaccttttcttgggaacaattctctttcctcttcaaaccaattattaacattttcttccttgctgatatttgagtgatattcactactgactttttttttttttagttcttttacatttctcaagcaggttgttgaaactttggctctaactatatgaagtgaattgtttttttactggtgttttcgctgtgtaaatattgtattcagtctgagtttacaagaagcaaataacttagcctattctggtttggcatgttttctctttctaaccaccattggggctgaagctgggaactgaacacaacttgaaattttgtggtttgggtgctagaattcagagctagactatctgaagctaaaaattattaatgttgaaatgttttcacccactaaataaacctgaaaaaaaatgaaatgtaactccaggcagcccataaaatcgcatatggtataatttttttgagtctaggaagagatgaaaaaaatttgtgagcaggatctgagattgttaaaaaaaattagaaattgtttattatggtttaaagtaaatgctactatccaaactctaatccaaactcaacaaacaaacccagaaatctcttactgttattcacatgatgttttattttctccaagactatactgaatcagtacataaaaataatgaagtagggaaaatgccagttgcccttgtttaacttttcagctattttttacatgttttctttaaagatagaatagtaaagtaatactttacattttcaaggtacttgatacttcactgaatatttccaaatatatcatcttaattaaaataatggcttgtttcacccttttaaaaatcacaaagcattgaacagttttcagctcattaaatctgagaacatatccaaaacttggcacatggatagtatgtatagaaaggctagtcctttttcctctgctagttagcactctaatgatattaatgatggaagatttttctcagcccctttgctggacttatgacaggggtatcccatttactcggcccaccatgctcaacctcttgcgggagggagcacgtgagtgagtgagtgcgggatctggctggctgttccaggcacttgcaggagcaagcttcatgtgctggtatgagtgagcaagtgcgggatctggccagcacagctcggagtgccagcaggagcaagctctgtgtgggatccgcggccagaccaggcatgagctagcgagtgtgggatccggccagccactctgggagctgccaggagcaaactccatgaagggcccgtggaggcacccaggtaagggtgcctgtgaccccgaatccccagagtgggtgttacagtactctcttagttctgccctctgcggacggtggtgtgttagcagctcagttggccccttacctcgttatgtggggcagttgccctctgctggtgagggcaaagggccagcgtgacagccttctgggtacccgcacttggtgggtccctgtctggcatccaagaagaatgaggtcagttggacaattgacggatggtgaaggcagataattttattgagcgatgaaaatgactctccgtggagaggatagctagagaggggacaggaagggcaggtcatcttccctaaagttgggtcatctcttccccgaagtccagctgtcttacccaaagtctggccatctcccttaaattccggctgtctccggtattgattgagtttgggttctttataggtacagaatggggagtgcatgctgattggtttgcaattatgcaaaaaattttaaagcaaagacaccactcaaaggtgggcgagacagtgtggaaaacgaattaggaaagggtaggtatacgtaaaataggtgaagggtgaggatcagtccagaggaaagcgtgccaaacaggaagacaagttctcactctggtccagggatttaacatatagcttggctttcaggctttgaactgtatccggcttggaggtggggtttcaccggatacctggccctaccctatctgcctaggcatttcactgcctcctgtcgctatcattagtaagcataagcatttctttatttcaagatccactttcaacttttactgacagaagtttcccttgccctgatatctggtgactaatttgatccatgttgtttttgaaaatgaagaaagttccataaaaatgtttagagctctgaatttagactagcattctccaaagcagggtatgtaaaatgtttcattaggttgtgggaagaaaatattaaaacttttattgtttcaatctaacaaatgaaatttaccttaattaacatttaatcaatggatcaacactgacatcctcacttggtctgggtgtcagactgttgggtatcagttatagtgcatgaggaaagcatgcaggggttgacagaggccccttgcttgttattttcaacatactgggatgaattataagtctgcatatatctagttaggtggatttatggatttaacaaaatcaaagttcacaaaacagataaatggcaagaaagattcctgcaaagaaactaaattgtgtgcaatactaataatgagagtggaagtgagccacacacatgtataggtcagagcggatgcttctcctatgagacattaatgttgaagtaaaaatcaacaacaatctaatctcagctgagaagatgtccagaaaaagtgaaattataagcaagacaatttgatagatggaattgtatccactattgttaacaaagaaacactttctgatattttattcccttgaaatactggctaacaatagtaggaagccatcataattaatgaacatgtgggacaggaagttaaactgacaaaagtttttccatgacatttaaagttatgtgacacataactcagtatctagaaaaatgtcattaaaataaataatagatatttaaaagcatcttttgtgttttcttaacagcaaaagaccaaatacagtacattattagtaacattagggacacacttgttcataaaatggatgaaataaaacataggaaacaatatggcaacaagttaaatgaatttttttttttgagcgaagttttgctcttgttgcccaggctggagtgcaatgacgcgatctcggctcactgcaacctccacctcccaggttcgtgcgattctcctgtctcagcctcccgaggagctgggattacaggcatgcaccaccacgcctggctaattttttgtatttttagtagagacgaggtttctccatgttggtcagactggtctcgaacttccgacctcaggtgatctgcccacctcggcctcccaaagtgctgggattacaagcatgagtcaccgcacccggccttaaatgaactctttcatgaacaaatactttgagaagttgcatagaaatctttgaagatgatttgaatcattgagaacttaaattatttaatgtgagaggatgctatatatttgaagtacagatgtttctaacaaggctcagattatcatagtagctatattttgtttcaataatgaaatacatgaagaactaatttcattttgtgccattaaaataaagatgtatcagggaagatatattcttgaaaataagtgactttatgaatacaaaacaatgtatatgagagaatttcctgggataacgatagtgttttgactttgtaagagtttaggttgcatacatgtatgcacttgttcaagtttatgaaatggtagacttataatttgcacatttcattgcatgtagaatttactgcaaaaggaaaaaaaggaataatacatgttaaattctagttaatgctatgcatgctggactgttgggggaaactatattaatgtgtttgacttactttgaaatgcattaaaaaaaccctaagatggattggtgaatggattaatcatacagaaagcatacagtatagtcatagtatagtataacaaatacagtaaaaattttaaatgcagagtctaagtggtgggtatatggatggtccctgtaaaagtctttcaacttttctgttgcatcatccttaggtaatctatagcaacacataggttgatgtcagatatgcaaagagagtatttcagtatggtattaatgttgttaatttttcttaaaatctgactgttaggctgggcatgttggctcatgcctgtaatcctagtactttgggaggccaaggtgagaggattactttagctcaggagttcaagaccatcctgggcaacatagtgagaccttgccactacaaaaaataaaaaattacctgggtatggtgatgtgtgcctgtagttccagccgcttgagtggtggaggtgggaggattgcttgagccctgaaggcagaggctgcagtgagccgtgatcatggcactgcactccagcctgggtgacagagcgagaccctgtcacaaaccaaaacaaaaaaacaaaaaatcctaactgttgtatagaatccctagtgtactctataatgagatgagaagtgaccatgagaatcatttgaatcacaagagcatctctgattatcttacagcaaagactgtaaaagaatcattgaacttaaaagatgggttagctgggcatggtggctcatgcctgtaatctcagcactttgagaggctgaggtgggtggatggcttgagtcctggagttcaagaccagcctgggcaacatggtgaaacccagtctctatgaaaaaaaaagctgggcatgtgtgaatttgaggccacttgcagtaagttatgttcatgccactgcactccagcctgggcaacagagtgagaacctgtctttaaaaaaaaaaaaaaaaagatgggtgaagcatgtttttttaaatgaaaagacaagagatgtcaaatttgctgacccttttttgtatgacaagtgactatgtaatctgcattgcagattaaacaccaagcaaccaaccaatcaatgcaacactgttacttcatttcttcaaggtaaaggtaatgttttaacaaggagtgaaaatgtaactgccttttctaaaggctgggataaaaacacagaatgtttttaaaatcactgtttggaatatttcttttatcatgtgatttttgttgtcaaagatatgtgtgtcttatgaaaatttatctgcactcttaaaaaatacttggaaaaatattttgtatactcttcaaaaatgttacaaatagagtttcagtcagtgggggggaagggggaataggggaaggagagatgttggtaaaagggtctcaagtttgttagacagtaggaataaattttggtgatttattttacagcatggtaactatagttagtaataatgttgtatatttcaaattgctagaagagtagattttaaatgttcccaccaaaaaaaagataagtatatgaagtgatagatatgttaattagcttgatttaaccattctacagtgtactataaacatatttcaaaatatcatcatattgaactccataaatatatattattatttatcaattaaaaatattaaaacaagcaaaacccatgatacatatctggtggcaaatgagtatcgtggtagaaattcatcaaactgctcagatgtgatttgtgtacttttctggctgatggtcatacttcagtaaaactaaataaatgtaagcaaaaaaaaaaaaaagtttcagtgggtttttaaaccagttgttaaaaatgttaaaatgtgacatgttttgattcgtctgcaagaacaatcaattgacgtgaaggaagatcaataaaaacttttgcataattgatggaaggtattgaaaaatgcaagtagtaatttagttaagtccaacaaatgatgtatttctttaatttcaatccttgcatctttgtaattatccccttctcagcttacaattaagtactgaaataagtggaacttaggacctgacatttcaatcaccgaatcacaaaatatttacattattattttttaaagatacaatttggcttattattttcattattatcattgctctacttaaaatggtaagcttttatgagagcaaacagatcttttatataagtaataaatattataaaatgatttttaatgtttataatttttaattcatactttgtgtgtgttttatactctataggacatattagtaaaatagtatgttcataataaatatgcatatattggagggctgtactaaattttgttttgattgctttttttggctggtttgttggggtatgtggtcaaataagtttggagaactctctttactgatctctcataatctggcaagctattattgacaggagtaattatttattcttaaagtctaaatgatcattgtaaagattataaaccagcatatagttttaaatatgggaatttttttttttttttttttttttgagacatggtcttgctttgttgctctggctggtctagaactcctgggctcaagtgattctcttgcctcagcctctgggattacaggcgtgtgctaaacatttgtgttttaaggttgaactttgataaatgaagtttacctttagaccaaattctgaaacagtggttctcaaagtatataataacatcagcattacctgggaacttactagcgatgtaaattctcaggccatgacccagacctactgaaccagaaatgctggttaacaagctttccaggtgattctgatgctcactcaaatctgagaaccacatatctagatgatttagactcatgaatcactcctacttatttcttcctacttcataatgtatctgagacagtttctttattgtatgtcttagttttagcccagacttttttccctctcttagatttttttttcttttcccttcctctcctctccccttcctctcaatgttaaaaaaaaagttctttagtgttattttcacaaagaaatagtgcattggttctaaaaatttgggcgccacaactaatgtgacaaatagcatgtgtttaaaggagatatttctaaacattttcaaattaattttgttaactactgtattagttcattctcacattgctataaagaactacctgagactgggtaatttatgaagaagagaggtgtaatcgactcacagttctgcaggcttaacaggaggcatggttgggaggcctcaggaaacttacaggggaagcaagcacatcttattatggcagaacaggagagagagagagacagacagagacatcttactatggcggaacaggagagagagagacatcttactatggcagaacaggagagagagagagagagaaagagaaagtgccacacacatttaaaccatcagatcttgtgagaactcactatcatgagaacagcaagagggaaactgccaccatgatctaatcacctcccaccaggccccctcctccagtactggggattacaattcaacctgagatttggatggggacacagagccaaactacttctagttacacttgaatatggatataattaatttcctattatttcctgtctatactcttttgatttcaacttttataatctcaaaatagttttctgccaatgaagatttcaaaacagacatttcaaagtaggaatcacctaaactcaacagttgtttataaagcaataaatttgctttatttctctttctacacacatatatgcacacacatacacatttttatttgctgaactgtttgaaaataaattgtgtacatcagtacccttcacccctaaatactcttaaaaatatggattaaagtagcccttaatgggactagtgcaacattgttttgaaatgctaatttttaacaaatgctcaaccatttattaaagactcttaaatattttaaggtcctattataaatatcttcatgaggaaaaggtatagaatgccaagttatgatggtataaatgagtgaatgtttcagcctttctcaactaaaagtttctcatctgaactacaaaatacagtggatgatttgagtgactattttctcaattcctccaaggatggtacataactagtgccaattcagatgcagaggggagaagttaattcattccatacaatggatgtcttgggcttaattctctcctgggaacccaggttagttggactgcatatatggcaaagtcttaaaaggattttgctttgactggcttgtgatgtttatctaaataactttttttttttttttttttttttttttttttttttttttagattacaggtccaccaggttgtggaaaaactcagttttgtataatgatgagcattttggctacattacccaccaacatgggaggattagaaggagctgtggtgtacattgacacagagtctgcatttagtgctgaaaggtatgagattttattttctattataatgttttacttttgtaacttatatacagcatgaaacatttacacataggttaacatttaccacccctcccccttgccttttttttttttttgagatggagtcttgctctgttgccgggctggagtgcagtggcacgatctgggctcatggcaatctccacctcttgggttcaagcgattctcctgcctcagcctcccgagtagctgagactacaggtatgcaccaccacacctggctaattattctatttttagtagagacagggtttcaccatgttggccaagctggtattgaacttctggcctcaagtgatctgcccaccttggcctcccaaagtgctgggattataggcgtgagccactgtgcctggctttttttttttttttttttttgagatggagtctctctctgtcgcccaggttggagttcagtggcaggatctcagctcactgcaacctccgcctcccgggttcaagcgattctcctgtctcagcctcctgagtagctgggattacaggcgccctaccaccaggcctagctaatttttgtatttttagtagagacagtgtttcaccttattggccagactgctcttgaactcctgaccttgtgatccgcctgccttggcctcccaaagtgccgggattacaggtgtgagccactgcgcctggcctaaattggtctttttataaatgtatcccagtagtaaatgaataaggaatgatagaatatcaccaaattacaaactctgacaatctaatggatctaggcatttaacatcacaaaaagatgacgagtcactggggtactttctgatggaagaacaatcaaatttgaatgtgatcaaggcttcagatccagccaccaatttacaacctagctagagaagagaggaacacatcaaactgctctagaaaatgcaattagcagaatccaaactgtgggaaataacagaacaaacaacttggtttctgtaacaaataaattgtaagattaaaaaatagttggaaggggaacctttggattaaaacagatttaaaagccttattgatcaattgctgtgtgattaacttatttggatcttgacttaaataaatggttaaaaaaaagaacagaagaataaacattgagactactggaaatttgaacatgaaaatatatttgagattaaagctggtaaagactggttcactcaaattgtccaagtactctttaaaatgccaatgactagccttcgactaacaagccaagtaggtattaaatagccagttatgtcataaatagctaatgttcaaatagctcttacaaaggtcctggggaatttgggtaaagaattcaaagattaagattatttttataacagcagttcagttcactgtaatggatttctgctttctttgcaccacatacaaaacagagtttaggatgtcttcttaaggaggaaactgttgcatgttattttattaccagtattacagttcagagcagtgtaaaaaccttatcaatgaattgggtgatatcagcatacatacagaagactagcaggtgacttgtctgcattttccaaatgaatttgtggagagtcttatgttttttgtctttgcatagagccttaattatttactttttgaatcccccatatttacttatttctccttcatatctttttctgccaatgtgcatgttggtatttacatcagaggcaggttggaaaatgaagaggtaatattttagctcctttgttggaattacgttgcatagttcacaaggagctcttatgaaggtcatttgagaataggggttgaactttatattgtatttggttttttattccattctccacaaggcttaaaatgagtgatcatctggctcacacatggaatggattttgaggtctggtgatagggccaagtagaataaaaaatatgaatgctctccgatatatatgccagatttggcattcttatactaccttctagtttgtcatggtgggtcatagaatggaactggccctgtagtgtctgatcacatttcattcattctgttacaggacagcttaacccctatttggaattatcaggaaaggttggccaatcggttaggaaagcttactgctgcagataactgagtatccaaagaacagtagcttaaacaaaaagaggtttatttctctcatataacaagacctgagtaggtggttgctggcactgggtcactcaggtctcagtgatgacagagagacctagggcatgcacattttcagacatcggattcattctgtgctcaagtcagtgtgaagaaaaagggccagctatatcttttatcaggaaagtgtacttttattcataatatctgcctcctcccatctgtggatttcctttttgttgcctgtagtcctcttgtagatttctcactgagtcacctctatatgtaaaaagaggctgggaaagtgaggggagaagatcgtcgtaacaatcatgatgagttgtctggttaatattgctgcctgaataaaactggggctctcatagcgaggaagaagtggaaatggatattggattggtaattaacagtttctgtcccagccccagctgtttctggacttagagaagaggtaaggcagggaaatatgagacgcaaaaaggactatgttgtagctctgtatgtgttcacattgtctccactttgtgcttgcaaagctagccggctaaccagcacaaatgagaaagtgtttaaaggattaatatgatgaaggattaaaggattcacatatatagaatttagggtacgtgagaaaaagttgaaaataatttcttcctataaatatctagatatctttttactaagaaggagagagaaatcaaaggaggaataaatacaaactacttaggtttaaaatgtattaaagagggaggagccaagatggccgaataggaacagctctggtctacagctcccagcatgagcgacgcagaagatgggtgatttctgcatttccatctgaggtaccgggttcatctcactagggagtgccaaacagtgggcgcaggtcagtgggtgcccgcaccacatgcaagccgaagcagggcgaggcattgcctcactcgggaagcgcaaggggtcagggagttccctttccgagtcaaagaaaggggtgacagacggcacctggaaaatcgggtcactcccacccgaatactgtgcttttccgacgggcttaaaaaacagagcatcaggagattatatcccgcacctggctcagagggtcctacgcccatggagtctcactgattgctagcacagcagtctgagatcaaactgcaaggcggcagcgaggctcagggaggggcacccgccattgcccaggcttgcttaggtaaacaaagcagccaggaagctcgaactgggtggagcccaccacagctcaaggaggcctgcctgcctctgtaggctccacctctgggggcagggcacagacaaacaaaaagacagcagtaacctctgcagacataaatgtccctgtctgacagctttgaagagagcagtggttctcccagcacgcagctggagatctgagaacgggcagactgcctcctcaagtgggtccctgacccctgacccccgagcagcctaactgggaggcatccctcagcaggggcagactgacacctcacacggccgggtactccagcagacctgcagctgagggtcctgtctgttagaaggaaaactaacaaacagaaaggacatccacaccaaaaacccatctgtacatcaccatcatcaaagaccaaaagtagataaaaccacaaagatggggaaaaaacagagcagaaaaactggaaactctgaaaagcagagcgactttcctcctccaaaggaacgcagttcctcaccagcaacggaacaaagctggatggagaatgactttgacgagctgagagaagaaggcttcagatgatcaaattactccgagctacgggaggacattcaaaccaaaggcaaagaagttgaaaactttgaaaaaaatttagaagaatgtataactagaataaccaagacagggaagtgcttaaaggagctgatggagctgaaaaccaaggctcgagaactatgtgaagaatgcagaagcctcaggagccgatgcaatcaactggaagaaagggtatcagcgatggaagatgaaaggaatgaaatgaagcaagaagggaagtttagagaaaaaagaataaaaagaaatgagcaaagcctccaagaaatatgggactatgtgaaaagaccaaatctacgtctgattggtgtacctgaaagtgacggggagaatggaaccaagttggaaaacactctgcaggatattatccaggagaacttccccaatctagcaaggcaagccaacattcagattcaggaaatacagagaacgccacaaagatactcctcaagaagagcaactccaagacacataattgtcagattcaccaaagttgaaatgaaggaaaaaatgttaagcgcagccagagagaaaggtcgggttaccctcaaagggaagcccatcagactaacagcagatctcttggcagaaactctacaagccagaagagagtgggggccaacattcaacattcttaaagaaaagaattttcaacccagaatttcatatccagccaaacaagcttcataagtgaaggagaaataaaatactttacagacaagcaaatgctgagagattttgtcaccaccaggtctgccctaaaagagctcctgaaggaagcgctaaacatggaaaggaacaaccggtaccagccgctgcaaaatcatgccaaaatgtaaagaccatcgagactaggaagaaactgcatcaactaatgagcaaaataaccagctaacatcataatgacaggatcaaattcacacataacaatattaactttaaatgtaaatggactaaatgctccaattaaaagacacagactggcaaattggataaagagtcaagacccatcagtgtgctgtattcaggaaacccatctcacgtgcagagacacacataggctcaaaataaaaggttggaggaagatctaccaagcaaatggaaaacaaaaaaaggcaggggttgcaatccgaatctctgataaaacagactttaaaccaacaaagatcaaaagagacaaagaaggccgttacataatggtaaagggatcaattcaacaagaagagctaactatcctaaatatatatgcacccaatacaggagcacccagattcataatgcaagtcctgagtgacctacaaagagacttagactcccacacattaataatgggagactttaacaccccactgtcaacattagacagatcaacgagacagaaagtcaacaaggatacccaggaattgaactcagctctgcaccaagcagacctaatagacatctacagaactctccaccccaaatcaacagaatatacatttttttcagcaccacaccacacctattccaaaattgaccacatacttggaagtaaagctctcctcagcaaatgtaaaagaacagaaattataacaaactatctctcagaccacagtgcaatcaaactagaactcaggattaagaatctcactcaaaaccgctcaactacatggaaactgaacaacctgctcctgagtgactactgggtacataacgaaatgaaggcagaaataaagatgttctttgaaaccaacgagaacaaagacacaacataccagaatctctgggacgcatttaaagcagtgtgtagagggaaatttatagcactaaatgcccacaagagaaagcaggaaagatccaaaattgacagcctaacatcacaattaaaggaactagaaaagcaagagcaaacacattcaaaagctagcagaaggcaggaaataactaaaatcagagcagaactgaaggaaatagagacacaaaaaacccttcaaaaaattgatgaatccaggagctggttttttgaaaggatcagcaaaattgatagaccgctagcaagactaataaagaaaaaaagagagaagaatcaaatagatgcaataaaaaatgataaaggggatatcatcaccgatcccacagaaatacaaactaccatcagagaatactacaaacacctctatgcaaataaactagaaaatctagaagaaatggataaacttctggacacatacactctcccaagactaaaccaggaagaagctgaatctctgaatagaccaataacagggtctgaaattgtggcagtaatcaatagcttaccaaccaaaaagagtccaggactaaatggattcacagccgaattctaccagaggtacaaggaggaactggtaccattccttctgaaactattccaatcaatagaaaaagagggaatcctccctaactgattttatgaggccagcatcatcctgataccaaagccgggcagagacacaaccaaaaaagagaattttagaccaatatccttgatgaacattgatgcaaaaatcctcaataaaatactggcaaaccgaatccagcaacacatcaaaaagcttatccaccatgatcaagtgggcttcatccctgggatgcaaggctggttcaatatatgcaaatcaataaatgtaatccagcatataaacagaaccaaagacaaaaaccacatgattatctcaatagatgcagaagaggcctttgacaaaattcaacagcccttcatgctaaaaactctcaataaattaggtattgatgggacgtatttcaaaataataagagctatctatgacaaacccacagccaatatcatactgaatgggcaaaaactggaagcattccctttgaaaactggcacaagacagggatgccctctctcaccacttctatttaacatagtgttggaagttctggtcagggcaattaggcaggagaaggaaataaagggtattcaattaggaaaagaggaagtcaaattgtccctgtttgcagacgacatgattgtatatctagaaaaccccattgtctcagccgaaaatctccttaagctgataagcaacttcagcaaagtctcaggatacaaaatcaatgtacaaaaatcacaagcattcttatacaccaacaacagacaaacagagagccaaatcatgagtgaactcccattcacaattgcttcaaagagaataaaatacctaggaatccaacttacaagggatgtgaaggacctcttcaaggagaactacaaaccactgctcaaggaaataaaagaggatacaaacaaatggaagaacattccatgctcacgggtaggaagaatcaatatcgtgaaaatggccatactgcccaaggtaatttacagattcaatgccatccccatcaagctaccaatgactttcttcacagaattggaaaaaactactttaaagttcatatggaaccaaaaaagagcccgcatcgccaagtcaatcctgagccaaaagaacaaggctggaggcatcacactacctgacttcaaactatactacaaggctacagtaaccaaaacagcatggtactggtaccaaaacagagatatagatcaatggaacagaacagagccctcagaaataatgccgcatatctacaactatctgatctttgacaaacctgagaaaaacaagcaatggggaaaggattccctatttaataaatggtgctgggaaaactggctagccatatatagaaagctgaaactggatgccttccttacaccttatacaaaaatcaattcaagatggattaaagacttaaatgtaagacctaaaaccataaaaaccctagaagaaaacctaggcattaccattcaggacataggcatgggcaaggacttcatgtctaaaacacttaaagcaatggcaacaaaagccaaaattgacaaatgggatctaattaaactaaagagcttctgcacagcaaaagaaactaccatcagagtgaacaggcaacctaaaaaatgggagaaaattttcgcaacctactcgtctgacaaagggctaatatccagaatctacaatgaactcaaacaatttacaagaaaaaaacaaacaaccccatcaaaaagtgggcgaaggacatgaacagacacttctcaaaagaagacatttatgcagccaaaaacacatgaaaaaatgctcaccatcactggccatcagagaaatgcaactcaaaaccacaatgagataccatctcacaccagttagaatggcaatcattaaaaagtcaggaaacaacaggtgctggagaggatgtggagaaataggaacacttttacactgttggtgggactgtaaactagttcaaccattgtggaagtcagtgtggcgattcctcagggatctagaactagaaataccatttgacccagccatccaattactgggtatatacccaagggactataaatcatgctgctataaagacacatgcacacgtatgtttattgtggcattattcacaatagcaaagacttggaaccaacccaaatgtccaacaatgatagactggattaagaaagtgtggcacatatacaccatggaatactatgcagccataaaaaatgatgagttcatgtcctttgtagggacatggatgaaattggaaatcatcattctcagtaaactatcacaagaacaaaaaaccagacaccgcatattctcactcataggtgggaattgaacaatgagaacacatggacacaggaaggggaacatcacactctggggactgttgtggggtagggggaggggggagggatagcattgggagatatacctaatgctagatgacgagttagtgggtgcagcgcagcagcatggcacatgtatacatatgtaactaacctgcacattgtgcacatataccctaaaacttaaagtataataataataaattaattaattaaaaaaatgtattaaagaaaacaagaagaaaacccaggagatgatatacttaaaagcactttggaaaggtcagttctatttttagaagcaatgcactaaccaatttattttacatgtcttttagaagatagtaatctaaaatagttgttaatcatgcttgttcatcatagactgcaattgtatctccagactatttaacaattttaacaggtttgttgaacccacagcccgtgggccgcatacagcccaggatggctttgaatgtggcccaacaaattcataaactttcttaaagcgttatgactttttttgtgatttttttttttaaagcccatcagctatcattagtgttagtgtattttatatgtggccctagacaattctttttcttcctctggggcccaaggatatcaaagttggacacccttgaattagataattgtgtagcctggcactaaccagactgagttacagggactgccttggggagaggggaatgctattcaggcaaagatctagatcctcttctgattgatccagagaagatctgctgtttttttgttgtttttttttaacctactggacttctgcttaagatctcatatagtcttaggcaccatatgcttgtatataccttgagaatgtagataaatagattaatccagtgacccatccccatattctagtctatgaaaattttggcaaccatgagaattccagtttacatgaactgaattaacaatatattgtccgtattagagacagttacaaaaagatggaactgtgggttaagaataaaaaatgaaggtaatatggatggcaaatagtaatagaagtattgaaataatgtttttggagaaataaaatggataaaggaaagtaaagttgggtcttagaactgcaaattgaaggggatcaataagcatgtgagaaaaactgagggatgtagggaagtaagagatgagagccaggactctggaaggtgggaacctgaggaggtaggatataggactggaattttaggaggtagaagtggatattcctgagttgtaatgaaatcagaaaagctttgaaaattgggaagacaattagtccagcaagggaggaagacattaatcaaataatcactaaaatgtgaaattgtaaatattataacttagtatacaaaggagaggtacttgtattggtagtgtgtgggagcaatggctaagcttagatctgaggaagctgctgtatttggtgtgcatgtcacctctcagggtgccaagttccccacagatagttatctttaacacctagcaaactacagtcatgtgctacataacaacatttcagtcgaggatggattgcatataagatggtggttgcataagattataataccataatttttctgtatcttattaaagtttagatacaaagatatttgtcactgtgttacaattgcctacaatattcagtacagtaacactctgcacaggtttgtagcctaggagcaataggctataccatatagcctcagtgtgtagtaggctatactatctaggtttgtagaagtacactttatgatgttcgcacaatagtgaaattgcctaatgacacatttctcagtacatatccccattattatgcgccatacagctgtatttagagtgtcattctttctggatttgtatataaaattggaggcatagcagggagtggtagtggccagccatgactcaggctgattctgaaggtaataccagtgtggtcttaagaccattgacatattgacatatttgcttgttggtataaatttggaatctttgacccagaaagaaacaataggggagataaattccctcttaatcatttttttgagatagtttcatgacactgggtaggttttcctcagttcagttccagctgccttatcatttgtgaatctaggtgaattagtggggagggagatcctgaaaagtttctcagatagaaagtagaattagtcataagtacttattactgtaacaaaggtttggaatattctggaatctgtaatgaattaatagattcatatcattatattcagtaatatatattgaatgaatgaacagagatatagtacgtatgtacaagaagctttgagaagcaataagcctacattttagcatatttatgatgctacattttaactaagattttggaaaactttttacattaagcgtatgttttatttcaagttggcatgtggtcactaatgaaaagcttttatttttccttttatataagagctatgaagtcacatagggaactaataattttgtacagggttttgctccttaattgacatatgccttttgattctggaactgattacgaaagaagtctatctgtatccatgagcagttaactctttccagaattggaatctttaaagtgcattgtagctatcaggtccaaattaaggcatagatagtcacttgccaggtgagatttgatggcaaaagaaaaactaaaatgtggcctagaacttctttttcttttaaaagaggagcacttctaaccattttctgaggcattctaccacagtaaatcctttgattgtgggattgatagttagcattatttgtgtatcagaaatgagtcgttctggcagtgggacattgagagtggatgtagggttaggctaagttagatgatatggaaggggaagttgggaagtcggtggtgttttacctcaggacatctccactagcaattgatatgcaaatgattcatccagggagggaggagattttagaaataaagctcttaataggttttcagggatattgttttggggtttgatggactaagagtataaaggtagcttttctgacagcatggccctttagaatggtactacctccattttatgaattagtagttatcagttgagggagtaaggcagacagtttcccctttagtaggtattttgggaatttgtaggggggtgcaagaagaaattttttttttacagtaataaatagatgtggtccagggatgctagccattctgtaatgtgagggtcattaagactgataatgctataaataatattttataaattagagcattttgcagcatgatataattgacattcatctcagttgatgcatacagcagcactgtcaggtaaggagcggggtattatgatcttcattttagaaataagcaaaatgggactcagaaaccatgtgatttgcccaagatcatatggctaataagatagctgagaggtgaactcatatcctctttccactgaactgtggttggaaaaaatgattgactccgagaaaagatccaagtagtgttttcattcattcattcagtaatgcctgtttgacatttgggctttctgtctatgaatctatctttatcccatttcccattgggcttctagtctttttattcttgatttgcagaagctttttgtgtgtcttctagatattgtttgtcagttttacacattgaaaatatctcctcctgctctgttatctgtcatctttgtagtgtcctttattgaagagaaatttataatttaaaaaaatttattagagacgaggtttcactcaggctagagtgcagtggcacaatcatagctcactgctgtctcgacttactgggtacaagggatccccttgctttagcctcccaaatagctgggactgtagacgtgtgctaccacgcctggctaattaaaaaaatttttttgtagagctggggtctcaccatcttgcccaaactggtctcaaactcctgggctcaagcagccctcctgcttccgcctcccaaactgcttgaattccaagcataagccgccatgcctggccagaaatttgtaaatttgaagttgttgcctaatggtattggttttcagatcttaattaacaagttttcccccactattagttatcaagatattgtcttacagttttttcctaatatagttatagttttatcttttatgtcaatatctttaatccatcagaaatccattaaggatatattttaaatttttgtataaactgccacattctcctctagaaatattttacataattgtatctcaaccaatagtactttgagagccttcatcactgtttttagtttctttaattttgtcatacttgcgggaaaaaagtgatagctcattgttttaactattgtgaaccaacatcttttcatatattcattgtccatttatatttctttggcaaattacctagaaatacactttgtccattttttcttattgatatatataaatactttgtgtattatggatatttatgtttatatgatttttttcctgggctataattctataatttatctttcaactttggttatgctatcttttgttatctatgatttctttggtggttgatctttcagattttgctttatggctgtagtttttaaagttttaattttcagggcccttaaactctaggtggattatatcaattgatatttatcatattaggaatttaaactggaaaatttaaagaatatttaactattatctattatgcagtaagtccattacatggtatgtgtttttttgtgtgtttgtttttgtttttgagatggagtctcactgtcgccgggcttgagtgcagtggtgtgatcttggttcactataacctccacttcctgggttcaagcgattctccttactcagcctcccgaatagttgcaattacaggtgcccaccagtgcgcctgccaccatgcctggctaatttttgaatttttaaattaaagacggggtttcgccatgttggccaggctggtctcgaactcctgacctcaagtgatctgttcatctcagcctcccaaagtcctgggattacaggcgtgagccactgtgcctggccattacatgttagcatattgtaccaaacagggctccattaggaaaatagaaccagtagaacatatattaagagagttattgcaaagaattggcatatgcagatgtggagttgtctgaaatccatagggcaggctgttggaaagggcaggctagaactctcaggcaagggcctaagctgtagtccataggtggaatttcatctttttaaaggaagtctcagctctgctgttaaggcttttcaagtgattgaattagcccacccagattatgtaggataatctctagtacttaaagtcatctgtttatggacattaatgacatctacaaaatcctttcataacaatgcatagattagtgtttgattgaataacaggagactgtggactagccaagttgacacaaaactgactgtcatatattttttgtttgttttttgttttttttttaagagacagggcctcgctctgtcacccaggctggagtgcagtgacatgatcatagttcactgtaacctccagctcccggacttaagagagcctcctgcctcagcctcctgagtagctgggactacagatgtgagccactgcacctggactttacatgtattttttatggaaaataaatacatttttgactaaaaaaagtgaaaaaagagtggcgttgttttatgtttttgcaaatctctttagtgtctgacttaatagaagacagcctgattctaatatctgcttctgcattcagtctgttgcactctgttgttttggttgagatatgaagatctggccttatactggttatagttggaaagggaggaatattttaatagtctcttcagataattaaagatatgcttctttgatactacaccaggaattgagtaatagttgcttagaggttagttgtgatatagaatctgaaaccatattattgcattttttctacagttacattaaaatctattcatctgtcttaggctcttaatggatatttacctatgcatgattttgtaatattatgcatttatcactcagaaaatattggttcactgtcttatggagttctaaatgttgacacattttattactcaatataaaaaaatttcattagtatctccactgatctgaacaaaaagtatttaagtattgggatgcagtcaaactcatggtagcagatgtaagttttttaggaatctgatttttcattaaaagcttgaattttatcattggcaataaatattgccacttgtttttcttgaagtgtcgggcttactttgctcattttgagaaaacgtctaccaaatacttaagtcagaaaaaccataacttatctatcaatcattctttcaagtaaaaatggtctcccatggaaaaagtgacttcttagtctgagaacccaattgtacagatgtttttccttgagacaatggttgtacttcagaatgtagtagaagtgcttctattttgtcaaacagaatattaaaaatatgtctgtgttctaataaaactctattgacaaaaacaggcaatgggccatagtgcacagtttgacaacccctgctttatttaactccttgagcaaatgtagaagattaataatagccgttttgaggtttttatccatgaatgccatcatatatataattttttaaatctgtttttattgactgatttttctcctggtaatggatcttttcctcttcctttacttgtctggtaatttttcaattcgatgttaaacattgtaaattttacgttgttggtgggtgctggattttaacatatgtttttcaagagtgttaggttttgttttaaggtacattttagtattagtttgatccttttgcaggttgcttttctatgttgttatggaaaaatcccaggtacagtcatgcttcgcttaacaattgggatatgttctgagaaatgcattgttaggcaatttcattgttgtatgaacaccctacagtgtacttacatgcacctagatggtatagcctactgcgcacctagactatatggtatagcctattgcttctaggctatgaacctgtacagcatgttactgtattgaataggcaattacaacacaatggtaagtatttgtgtatctaaacaaaggaaaggtattgtaaaaatatactatataagcttatgggaccactgttgtataagtgatgcatcattgactgaaatgtcgttatgcagcacatgactgtggttttttattctgaaacttatttagcttcactactaaggtaaaatccttctgaaaattctgcccaatgcccagtgtataataaggtctctttattcttcaccttgtgtaaacccgaactgttctcaccctgtgtgggcactaggaagtgttcagtctgatactttctggtggttctttcctcaacctcaagtagtttcccttcacacatgtgcagattagttctcaagtggccctctctgcagatctttgcagtgctcactctgcacacctgcttcctctctggtactctgccccataagttctagccaccttagctttcccaaactccgatccccatctcctcaactcaggttgtctaccaggctctgtttactttccctttcttgtgttgcagcctggaaactgcctctggagcaaactgaggtgattgtaagctcattgtgtttgtttcctttctctcaaggattacagtctcaagctttctattgttcagtacctgaaaactcttatttcatgtattctgtctgattttctacttattattttagtgcaattcatgtaccagttaatcctttgtgggctaaagtggaaatcccttctttcattctctcttgagttcactctatccaggcttaagtttccagctctataatgcaactgatttaaaaaattttatccaacccaatagcagcattcgaaagagttgatcactcactttttcttgaaaagctctcttcccttgactttttatttttttagacaggttctcacctaactctgtcacccaggctggagtacagtggtgctatcatggttcactgcagctttgacccctcagactcaagcaatcctctcacctcagcctctcgagtagctgggaccacaggcatatgccaccatgcccagctaattttttaatttttagtacagataaggttttggtatgttgccctggttggtcttaaacttctgggctcaagagatcctcctgccttggcctcctaaagtgttgggattataggcatgagccaccatgcccagcccacttggcttcttggaactattctctcttcttttacacctaccttcttggtcacctcctcctctcagtcccttttgctggatcctcctcatcattttaacttctaggctttggggaatcccagaactcagtcctaggaccttttctcttctatatctgtactcaatccctaatatcatctggtcttatgatctttaaaatcttttataggctgtaactcctattgatatctgaattctgagctttcccatgaacttcagattcatattcatttgcgtaatgacatggaacttggataggtttacatacatggatttcctgatatgtccaaaactgcatttttgtttcccccatgaaggaaataaaacatgcaaataacaccaataaccaaaacctttatgtgaatcttgtcttttctgcttcaataaagttgtgattccattcttctagacactcacccaattagtcaagaaattctttctttttttttttgagacggagcctcactctgttgcctaggctgagtgcagtggcgtgatcttggctcactgcaacctccatctcccagattcaagcgattctcttgcttcagcctcccgagtagctgggattacaggcgcccgtcaccacacctggctaatttttgtatttttagtagagacggggttttgccatgttggccaggctggtcttgaactcctgacctcaggtgatccgcctgccttggcctcccagggtgctgggattgcaggcgtgagccaccgtgcccggccaagaaattctttcagctcctcttttgaactatatcttgagtctagttacttctcatcacttgacctgttacttccctgggtgaggtcactaccagctcttaactggtcactaccagctcttatctgtgctagctgatctccttgctttcattcttgcccaagcctcttctccattgggcagttagagcagtccttttaaaaaaagaagtcagatcatgttgttcctgcttctaggcttcctattttgctaaataaaagctaaaaaaaaaaaataccactttagcaaaaaaaaaaaaaacaaaaaccacagacctaaaggtcttatgtgatcttggccttggctagctctttgttttcttttattctccctcttactctctgtgttccagatactttagtctctttgttgtttctcagacacaccaggcatctttccacatgtaagcttttgcacttgttataattctctattcttgtgtgctgtttcactgggtatccacatggttcattttcttatctcttttaagcttttgctcaaatgtcaccttattaataaggctttgtcagttcacctgacataaaatataaaatagcgctagccccacctgtcacattctattctctcatcctgcttcattttcctctacagccttattacctcatatataatatatatttatttgtttgtcttcctcagtagaatttaaaccctatgaggtaagggcttttctttttcttttggtagtggtggttgttcattgccatattctcagcacccagaacagtgcctggcatatagtaggtcctcaataaatatttgttgaatgaatggatcttagtgctcattttgaaaagaatgctttttataaacagatatccactagatggcattattttcaaactttatgtaattaatgtctgggagcaaatgataggttattttctgttttttgccctaaacaaaaaagatctttgcaatgaagattgtcacaagaagttactaggatgaatgtgaggcatgtcgaatattgcatttatatttggtttttgatttatatatttttagatgtttattataaaataaaaaacatttagagaaacaaaattacagcatattggtgtgtaaatgatccatttaatacagttatttagcatggtaactgtgaacaaaggttgttcatgtctatccattgaccaccattccttttgtgaggccttcagcaatggcaaagcagcagtaagttccagagcctttcattactgaagccactagtggaaatccagaaaattgtcagctgttcagttcttgttgctaatgagctaggtactctcaatctggttcctaatcaactgggcattcaaattttgaaaaatttccatgtttctagaagatgttgccagacctatcctgttaaaaactggtaggttctaagtgccagagatttttagctgacttctctgaccagcactaaactcagcaaatagtttccctaatcaaaaatttacacttttcccccaaaccctcaggatttggctgctctgcctgtgccaatgccatctcatttcttgatttcctcccttacctcatttccttcttccatttcaatccctgtgcctctcttaagctcttttcctggatggttatttgatccattttattctcactcttcacacctcttttggtactattccttattcatgaagtattttttcctcttcctgttcaacttagctatgtatatttttcttttcaaattgttcaaaaatacacttaaaaacagttgttgaagttctctcttctcttttcctgttttgggcttttctcttttatttctgatcatagcaaatgtaaggacttgttttggttatgtttttaaagttcccagcttcttctcagaactctaactatttagaaatgaaaacactgttcttttgtacttttgagtctctaaatggaaaacaaaatataggatgctttttgagtttacagcctctcctcccagttcccctgggatggctaagtactagggctgataaaatgtcatttcatttaaaatgaaatgtgatggttaaactcaaaacatttaaaatgaaatgagatggttaaactcaaagacttatatttttaacatttttaaccataaatatgagaaatttctagtaatgctttccatatcttataatatgaatgatggcattttaacttgtcactctcttgtgtttggcctactgcatgtattaaactggctttgaggccagaattcagtgtttagaaaatcatgttttgtttactaagaaagtattggaacattaatttatttgggccataatttaaaggaattattgcatagcattaatttgcatgaattgtttcaattgagaaagtgtatttttctggaatgagacatgaagacttactgatatctattataatacaatataccatatttgttcaaatatacttatttcattcaagaaaatgaaagcattcttatttagtaaacatatcttatagctgctactctaaatatcacttacaaaaaacatatttaatcccagaaagataaatctcaagagacattgttgtttgctcaagattagatgagatccaacagcccttgctggttgcatgctctgactgctaacctctgttagtgcttacaaaagagagcttaattctaaatctgtatattaagccattttgcttatacctgctctattgataaggcttaggagtttctcaagtaaaattaattagagattcagcaatgtggctttaagtagaattgactgttttcgtttgtgctatttttttcacccacagactggttgaaatagcagaatcccgttttcccagatattttaacactgaagaaaagttacttttgacaagtagtaaagttcatctttatcgggaactcacctgtgatgaagttctacaaaggtatgctgctttagattttgattttttagtaatgcgttgaaggtttatgttttatcttttatgtttcagcttctaagtgaaaaaagtctttataggttagaattatgtggagtaactttttcagtgttcttctttgttatagccttttggttgaagtctttcttgaaaaacaaaaaaaattaaatgaataaaatgttctgtatttaattaattaagtggtgtattatttatctattgtttcattaacaaattgtctcacagtttagtagcttaaaacagcaaatacatattatttcacatagtttctgagggttaagtgtctgggagtagcttagctgggtgtttctggctcaatgtcgctcaagaggttatagtcaagctggtggccagggctgcagttatcttaaggcttgactggagctggagtacctgcttccaagctccctaatatagttgttggaagccctctgtttcttgctggcagtgggcaagagacctttgttccttaccgtctgggcctctccataaatcacaacatagcaagttgctttcctcagagtaagtgacctgagagactgggcaagtgaaagagtacccaagatggaagctgtagtcttttataacccacactcagaaataaggtaccatgatcttgtcatatgcttgtggtcatacagatcaagtctggcacactgtgggagggacctatacaaggatgcaaaataccaagaggagggagtaagtgtgggccattttgcagactggctaccacaagtagttttaccccagaattggagcgttaacattatcttaggagaatcaaggaattctgaaactacacagaaacagtttgctctgtttccagaaaagtatgatatgtctacaagttaggtttactgaattcttgcaaatcattactgtaacttaggaaagaatagtttattgtttttaagttgcttagcctttgcaatacctttatttatttattttatcttaaatttattgactattttataaattcttcttttataggattgaatctttggaagaagaaattatctcaaaaggaattaaacttgtgattcttgactctgttgcttctgtggtcagaaaggagtttgatgcacaacttcaaggcaatctcaaagaaagaaacaagttcttggcaagagaggcatcctccttgaagtatttggctgaggagttttcaatcccagtaagtttttctttttttctcttttttcttttcctttcttttgtttcttttatattacattcactgacttatggtatcaaataataaaattagaggaaaatgtaaaacagatgactttttaaaggtagtacagtctaattgctatagcaaacatcgccatcatcttaaattagctcatctgctgagattattttattattttaataatttgagtctggagtagatttaaacgatgtttttaaaagttcctatagtccctccttttcttccttctcattgtttactctttgtgtgtgctttgtatcacatttctcacactgcagtaaatataaagtagtaaaacttcatgaaattgcctagatctatttctatataattaaaaaaaatactgcagttgttgttagttttgttttaagtattttaggtttagatactgtgttattgtgttcagcgctgttttgtgtacaataggatttggtttgcttcaaatggtcagaggtcaaccattaagagatgttggaatgatagtaatgaaagtgtcagtaagaaaaccttgaaagattatttgtggcatggctttttgtagcgggcattgtgatcagaaatctgaagatgacaggctattacaagggcttgtgatgtgtaacctgcaagacgtaagtgtgtactaagttacactcccatctgcagtgtgtcagggagttttagtcgttgttccacagcctcatcaacattcaggcttctcaattttagtcatgcttcatctcaagaaaagatagttccttaaactgagataaaatttggttatgattttataatttttagatttgtttttggaaaattaaaatcttggatctttgcaacataaagaatatgtataaataatataaactatcacacagcctttgaggtttataaaaccaaggaagaagtcaagggagaaaatatgacattcaaaaagttctgcatactttaatggctttttagtttatattttgaattaaagtcaagtgctgttaagtttgtcttgggtgatgttcatcttttacattttattgtagttggttaaaatgataaattcaaatttatatttttcctgatcaaggagaataagggaactttgaaatactgtataaagatacttgattgaatagaaagttatgtatatagttggccctctgtatctgtgggttctgcatccatggattcaaccaactaaagataggagatatttgaaaaagcaatgggtgtggtagtgtgcccctgcagtctcagctactcaagaggctgaggtgggaggatcacttaggcgcaggaggttgaggttgcattgagccatgttcatgtcactgcacttcagcctgggagacagagtgagaccctctctctaaaaatatatatatatatttgaaagaaaagaaaaggatagttgtctttgtactgaacatgtacagacttttttcttgtcatgattccctatagttaagcagagatttacatagcatgtacattgtattgggtattataagtaatgtaaagttgatttaaagtataccagagaatgtacatagattatgtgcaaacactgcaccattttatatgagggacttgagcatccgtggattatggtatctgcagaggagtcctggaaccaatcccccatggatacagggggatgactatatattcttattttattattaattcatactgttgcttgacttaattccgtgcaaaataaaattcactttttaaatgttgtgtttgtttgcttttaagtagtaactgtaggctaatgcttttcagtttttcctaaggtgatttattttcccaagtgagaaaggggcactgcttttctttgtttttaatagaaccctctgaaaaaataggtactgaatatcccatttctatgcctttggctttgtttctctatttagaaataaatgcagattatactatgtacttatataactgtgatatctgttttttgtgacaattaagattgtaagattggttttaaaaggattttgaaaaatatttcctttagaaaatgttggaattttcctagctaaattgatacatttaaatggaaaatctctcacacaggtccgagatttaattaaaaaaaaaaaaaggaaatcatgaacttttacacatttatactgtactttgaacaggcaccatagtactgttcaaattaattatgtcaatttaatatgttatatatgataatttgctaaattaaattattgcttgctatatatataagcttacctcacagattgtcttgaaatatgtatataaatataaatatataaaaataaaaaatatatataataaaaatatataaatatataaaatgtgattattcagcttttccccccctttctctatttgaactagtactagaaaacctcgtcttttgggaagggtgacatcatttggcccttatgtgcgcatgaatgcatttaagttttaagtatgctgttgcttttttctacgttagtccctgagaattaaagaggaattaatcgatatcacttgattgaaaacagatgtattaatatctttcagaagttttcaattataagatggctttactaatattttgaggctatcactgaaatgaaaacataaaattaaaaaattttcacagagaattttatagacctttgagtatgttcagactgcagttttgagaaacagttgtagaagtctggtagaatcttttctcctgaagtttatggaggaggtgtaagtgatactctgccattgggatggaagatgcggaacctttgtctttttaaagtgttcacactagtattgaaaaaacagtaggctctgaagctgtttagagatactggataaaagtaaccgaaaaaaatttaaatactgctttataaaataaattgtggttatggctatttatgttgactttatcattgacttctaattaccacgtacagaatagttattatacgtattgtaaattatgtatcagattaaaataataggatgtttttgccagaaaggaccttaaagaaaatttagtttggccccttcattttacagatgacaatgaatccgaaaagtgacctgatttgctccaggacactcaacataggaaaggacaaacagtgggtagaatgagagatcttttagctgccagtttggggatttttttttttccacagcagaattttctttttttctgagacatacagaattacggtggactgtaaacttctttttatttatttattattattattatactttaagttttagggtacatgtgcacaatgtgcaggttagttacatatgtatacatgtgccatgctggtgcgctgcacccactaactcgtcatctagcattaggtatatctcccagtgctatccctcccccctccccccaccccacaacagtccccagagtgtaaacttcttaatgacaggattatattttctgtttctctgatttccaggacctagcactgtggataactaatatttaggaggtaacagctaatgaaagtacaattaaggtttatgaaaatagtcttaccatatgtatgtcatatttacattcattggaatatttttctttatcttttaaaacataatttgaatttttttatgcttgctgctgaaattcttatgtttttgtttttaaattgacctttgtagtatgccatcttagttgtattctttttatttattttccattccagagttttataagttgttggaataaaagaaaatgaaaatgcattgcttagataacaggactttcaccttttgaaaattctttggaaatgctttttactggtatttccaaggtctacatttttactttttcagagaattcaacaaatcaatttcagttgttatatgaataatattgaacttttttgtctccccttaatcttcttctacttccttcatttcttgatattgtacaaatgttttctggtgtaaggggaggagtaccagttaacactatttacaaaagaggtttatggagataaatttggatatattattaaatattctaagagggaaatgccttattttcattgaaagttgttgttaaaatccaaattattttactaagatgtgcttataatccgtttttctgtggccatctgtgttcttgattacatgccttttgagaatatccattgctctaatttattgcttatcaaggtttttggaatattagtgattatttttatgtttaaagctgcttagacaaatgaatcaaaatatgtgcattttaaattttgctattttaaagacagttttaaatcattaacaaatggaaagaatttgttctggttttaaagtggacatataacaaggttaaattttttattattatttgagacaagcacaaatttttttttcctctttttaatggtgaacttcatgtgggcctggatttatttatttatttatttattttacaccatgagctgttccattatgccaagtgggtttaatttatgcaggattataccttgtcttagatactaataaatattcaaaatagaaaaataagaaactaggccacttcatttaaaataattaaggttttattaattataaattgggaatattgtgtttataactggtgagataagaggaaaaagaatgtatgtacccaaattcgacatttatttttatcttaaacataaatattcagaactgtcacttttgtgaaagcctgatgaagtcactctgattgtaaagtaggaatcctagacccttgatgtagacatagatatgccattaaaactgcagtcctgttttgctgtgtgtaacattgttgtatcacttttctagaaatgtaatttttggtttactcttattactttcatatttttactgaaaacaagcaccacaggacttctgaggtaagaaaagtcctttacaggatttttcttttccataaatgcttactgttggctcactcacatttgaaatcagattgttcttaaacctatcctatgttcattcaggtccctgaaactcacagtctagactaaacctttatcagttagtgaaaataattctagaaaaagtgtatctttcttttatgtagctctttatgacttctgaaactttgtttttattgtttctagcaaaaacctagaaacaacttaaaagttagtaagtaggtgattggctaaattaatgttgacatatccatacaatattatattgtgccactgttacaatgaatggtttagcccagaaatggattcataggttatgcaggcaagggttaattcagctagcatgggttactcatatccagccattcccaaaaaaggcctcttttcaggactgcccttgcctggctcctgggagatgagtgctgggccctgggaatactctgcctagtaagggtgttatatgcctgaggacttgagccacaggtactggtttgatcagattgtttatgcaaacagtgtgatttatggtgaagcctatttttctctggggatctggggactacaatctaaatagctgaggtcatctgcatgcaggcattgcatgcctagtgactgaccctcaatagaaatgctggacattaaggcttgagtgaactttcctggttgacattactttgcatgtgttgtcacacattgttgctaggacaattaagcacatgcatgcgactccactgggagaggacacctggaatcttgcacctggtttctcctggactttgcttatgctccttttctgtttgctcattttgatctgtatcctttttctgtaataagccataactgtgaatataacagcttttgagtcctgtgagtccttctagtaaatcattgagccagaaggtaatcatggggaaccttgacatgcaggggtgctaatagatatgtacaagagtatctatggcagcttaatttgtaattgctcaaaactggcaagatgtattgtagttaatagtattggcatcagtcttaatacattggctttgataattatggtttgtaagatggtgatattaggagaagctgggtgaagggcatttgggaactctaccctttctgcaactttttggtaaatctaaaattgtttcaaaataaaaagttaaaaaaagaaaaggaggtcaggtgtgctggatcacacctgaaatcccagcatttgggaagctaaggcaggaggatcacttggccaggagctagagaccagactgtgcaacatagcaagacctcatcttctcacacacacagacacagacacacacacacacacacacacacacacacacacacacacacaaaaaaacaattagctgggtgtggtgctacacacctgtagtcacagctacttgggaggctggggcgggaggatggcttgaacccaggagttcaaggctgcaatgagctatgaacatgccactgcattccagcctgggcgacagagcaagaccctgtctcaaaataaataaataaatagaaataaataaataaatgaaaaggagagtagggcgggttttatgagtagaagttggctctgggtagtcataaagaaatggcactggctgtatttggagaaggggacttgattttgatgcactggttctcttctatttagtcatctggtcccatacatattatctaatacctcttcaatttaaaccctgctcttcatctttcagcacatcctcttggctccgctttcgaaatacattcagtatctgattactttctaccaccttcattgccatcatcttggttcctggaggctaaaagtactggctttggagttagacgttggtttgaatcttagctccactatttgctaattttatgaccttgaataagtatttatcccagctctaacctttcgtttccatgtttgaaaaatgaggataacaatatctgactcatagggctgtgagtattaaatgagataatgtctgtaatgttcttcacaatgtttggcatattcagtaaaaagtagcctttaattattaattttactagttacctcgttccagatgcctggtgtattttatctctttcctcctaaaatattttttaacaaggctgcaagtgcctcagaaggaagaatcatgtcttattcactattgtatccccctctgtctgtcttactggtggatgctgttactgcctgaaccctcctttatctggttaacttacacttattttttggatctcagactctttttgtctttccttttcgattccacctacagcacttgtgtccaaaactccatgctaggaacaatgggataataaagatgaataaaacatagtatttgcccttaaggcttctacaaataaggtaattgtagaggcaaatcgctctctgtgatataatggagaataaaataagtatcttgtctactgttccttttctgtttcttaaaatatgtaagtagcttgtaagtaacttctctgtctgtcctttgtttgggactatagattacacagagggaattaaagggaggtagtagagaccttcatagtctctcgggtaaaccctttatcatgtctagctttggtccttaaatgtcccattctttttttctttttattttttgagacaaggtctctctctttcccaggcaggagtgcaatggcgtggtcatagcttactgcagctatgccgagttctagtgatcctcctgcctcaacctcccaaatatctgggactagaggcatgtaccaccatgcctagctaatttttttgatttttagtagagacaggtcttgctatgttgcccaggctggtcttgaactcctgggctgaagcagtctgcccactgtggcctcctaaagttctaggattataggcatgagccactgtgcctggccagggttccattcttatttagaaagtcagtgctcttttggagactgataggtagtggttaaattcataaagcacatgcataattctaaagttgtatgctaagaaaacattggaaatgaaggccagttgtagctcttagtctttagcgttactttacgtatgttacacagtaccttgatttgttgtagaattttctaactgaagatcttaaggttgtagctgagtggcaatcttgttttccagtgagtacagggatgcagagaatgaggtgatttatgtaagattgcttaaggagtcatttggataattgaataatatcacttgccgcttccatcctgggttgttattgtagtatcttaatgggtctgcttctctcttttctgtatcggtaatagtacatatgggtacataccattgctacatcattttcccaaagtgtatttctgatcacatccctcctatgctcagaagcattgtatggtaccatgatgcttatagaattaagccactagactataagcagtatgggggcagagaaactatttgttttgtccacagttgtatcctttgaagctaggacaatgtatggcacataatatatgctctaattaatatttattgaatgattaagtcttagtttaggatatgatataatatttaaagttctcttccttctggctccaacctactcctcccatgttgtcatttctcttctgtgcaggctgctggtatactaccccgagacctctctatggctttttagctgtggatgtcctcttctttcatctcttcctttctaaatttttttctttcctatctgagctctcaagttctgtctctcctctgagatttttgtatcactgttttagccccagttaattctaccttcttttgtagtacacatggtcttaacttctaattggaactttaattatgtatttgccttgcagtgtcacttaaatatttgcatgtatatatctgagctcctcagttatattataaagccccctgaaaacagaattatgttcttatgcatcctccatagctgcctatattgaatagtgtcatatattgagtaggtgtccaatatatatttgtagaatgatgtatcacactttttctagttaggcaatttttgaaatgcatgtctaattagatgcctacttcaattcttacactacttaaagggaaaacattctaacattcattctaaaaattgaaaagatactgggaaactaaaacttaagtgtctcccctgcacccctttaaaactgaatgtagaagatttgttgataatttgacagctctgtacctttaatttagtatgatgcatgaacttctgtgagacatcaaccaagattttatacgaagagctgtgatcatcaaggtgggaatttaacatcagtgctctgtacacatagtattactgtaatgccttctttagaagtttaacaacgtcaggtgatattctatgttatgatttttaacttatcaaaggaaagcattgtagagaaattagatcatctcttgaatagaatctgataactgctcactgtttaattaaattcaaataaacagtttgaaatagaatattggctgtatgagagtttggtcaaaggatattttcttgagtttttcaaagacaaaatttgtttttttggttgatatttttacatatcctttgcgtttcttgaatgtagttcacttagttaatacagtacagttaatacagttaccttccaagtaaagctggagggaaaatactttctgataagaaaatatatttcaaataataaaacagtatgatactagcataaaacagatatatagaccaatggaacagaatagagagcccagaaataaacctgcgcatgtgtggtcaattgatctttgacacaggtatcaagaatacacaagggggaaaggacagcctcttcaataaacggtgtcaggaaaactcgatattcacatgcacaagaatgagattgggcccttattttataccatacacaaaaaataaattcaaatggactaaagacttaaacataagacctaaaaactaaaaactcttagaagagaacatagaggaaaagctttgtgacagcagccttggcaatgatttattggatatgacaacaaatgcacaggtaacaaaagcaaaaatagacaaatggaactatgccaaacttaaaagcttctgcatagcaaaggaaataagaaaaggaacaaacaactcacgaaataggagaaaatatttggaaaccacaaatctgatgataaagggttaatatccaaaatatataaataactccaaaactcaatagtaaaacaagaacaagcaagcaaacaagagacaatacaattaaaaaatgggcaaaagaactgaatagaaatttctcaaaagaagacatacatatggttcacaggtataagattcacaaagttactaatcataagggaaatggaaatcaaaaccacaataagataacactcacatcgcttaatacggttattatttaaaaacccacaaaagatagtaggagtgggcaggatgtgaagaaaagagaacccttgttcactttttttttttttttgagatggagtttcgctcttgctacccagtctggagtgcaatggcgccatctcagctcactgcaacctctgcctcctgggttcaagtgattttcctgtctcagtctcccaagtacctgggattacaggcatgtgccaccacgcccagctaatttttttgtatttttagtagagatgaggtttcaccatgttggtcaggctgatctcgaactcctgacctcaggtgatccatccacctcagcctcccaaagtgctgggattataggcatgagccaccatgcctggtcccttgttcacttttggtgggaatgtaaattggtgtagctacctgctatggaaaacagtttggaggtttctcaaaacattaaagataggactaccatatgatccagcagtcttatttctggccatatatccaaaggaattaaaatcaggatctcaagtaaatatctgaattcctatgttcattgtaggattattcccaatagctaagtcatggaagcaatctaaatgtccatccatggatgaatggaaaaagaaaatgtcatatacacacacaatgatatattatttagccttaaataaaaaagaaggaaatactactatctgtgacaacatggatgaacctggaagacattacgctaaatgagataagccagacagagaagaacaaagaatacatgatcccacttttactagtatatggaatctaaaatagtcaaactcatagagcaaagagtagaatggtgattgccaggggctgagaggaggaggaaacagggaggtattggtgaaagggtaaaagttttagttacacaagatgataagtcctggagacacagtgcctatagtgaacagtaatgtatacttaagcatttgttgaaaggtagatcttacattgtgttcttatcccatacactgtataaataaagagcacaggtggaaacttttagaagtaatggatgtgtttatggcattgaccgtagtgatggtttcacagtgtacattctccaagttgtatgcattaaacatacacagttttgtatatgtcaaacaaataaaaagccagaaaacaactttaattttcctagttagaatgttttccctttattgaatataagaattcaagaggcacttaattaactttgtaagattaaaaatatttcccaaacatttaagaatctatgtaaaacataacagctgtggtttaaaggttttattatcttccaatacaagtaacaaaatgtaaattagaggatattaaaaattatgtatttttcacttgaacattgtttcctaccccttttttgacttctgtttatctttgatattgaaagataaatattcttgttgattttacatctctattaatttagattcttttttttctttttttgagtcagagttttgctctgttgcccaggctggagtgcagtggcatgatcttggctcactgcaacctccgcctcccgggctcatgctattctcctgcctcagcctcccgagtagctgggactataggcacccgccaccacgcccggctaatttttttttttttatatttttagtagagacggggtttcaccatgttagccaggatggtcttgatctcctgacctcgtgatctgcccaccttggcctcccaaagtgctgggattacaggtgtgagccaccacacccggcctagattattttaatgttgactcagtttctgctgggaaatatcttcttaaaagtgaaacatttgcattagattatagcttttttaaccttaaggctattttgatggttataggagagaaaagtatgtatggctagacagagagcaatagttctttttgtattaccattaatggtttgaacctaagctccttttaaaattaaattttgattataaacatttgggctttgaagtcccttttaagatcagggtccttatttattgtctcagagtttgtgttaattgttttactggaaaaaataagtagtcattgacattgaaaaaatttctacaggtttgaaatgctgttaagaagaaatagctacatcttattgataactactttttttgtttcgggttctgtagtgagtacattttaaacattttccatttcatattctaaataagtttgtgaggtaggttatactattccctttttatagttgaagaaattgaggcttatagaggttaaataactttaccagagtcacttggctagtaagtggaagggcttgagtttgaatccagatatgtgtgattacaatgcatgtgttcttattcataatggaacactgcctcctaatgcagtagtcaaaattattctattcccttgctgcttatcatactaaaaacttttcaatacttattgtttcctctaagcctttttcaatggaaagtctctaattttgctttatgctttgattgctgcttgtaagtgtaaccacagtgttgcttctgtattagtgttatcagtatttaaagtaagagaaatatttgattatttgcagctttgattgctttttcacaaacatgcaaatcacacatgtaatgttaagagtataattaatgccttttatgtgccagtgaatatactgaagacttgtaggttttctgaacaatattctcagaattggcaaacttgtagcttaagtcttgtaataaggatgctgtcttaggaaaataatttcaaaatacttgcactttagacctctcttggggaacacatgaagtaaggctgcttcctaagattctgctttgaggttttatgaagacacaatacatgctgttactggacagaagacattttagtttcatgacattgccaaatgtatctcgtaaaattcactgttcatgaatttaattaaaagttcttaggagcttaaaacttaaagtaggtattttagactcatgactcaaaggatcttctttcagtttgtgtgtgtgtgtgtgtgtgtgtgtgtcatacacacacacacacacacataaatatatatatttgaaggagttacagttctaaactaaactggaataaagtaatgcccatagttattaagtactaaagtacagtattttaaagaaatgttgaaattgttataatatgaagtttcttagtgcccctagcttacagccactaaagttagttttatatctgataccatattgtaatgaatttacttttttgttctgtatgatctttagcttagtttactgggttgcccaataacatgggattgacctgcctgctaaccttgtgttggagtctgcttagtccctagttcagctaggtccaagtttttgtctcatgaccaagaagaataaggcttgcagccactggagagtaaatagagtagaatttattaagcgaaaggaaagctcttagcaaagagaggggacctgaaagcaggttgccagaaataggactgagttctgggtcttttatgtggcaagagcaaggaagccttctgtgggttctgcccaaaatgggagggctaaagttccctcctaaggatgttgcatctgtgcatgcctggggttgactccatcttagttattacccgtgagtgcctaagcgaaagccacaggggtactaaaaccacaatgcgaatgtcatgttaatggcattataatgagttgggccaagttaaggacatttaggttgacttattgcgcctgtgcctaagttgggatggtcccttctgagcaacatcctggcatgagggtaagttcttaatcatatttcttctcattagctacagggacagtgcaggtgcagtcctgtgggtatttttccactccgaagaccctccctctctatctgcctaaactgcctcctctgtcacttggaaatggcagtttactgttgaacaatagacctctccttatgcttttctcttccagtctttgggaatcacactctgaagattaaacatttcactgagacagcatgacgcagtagaaggtacccagaatcacaatacagttcacagtaacaaagatatggaatcaaccaaagtggatgattggatgaggaaagtgtagtatatatacacaatggaatactattcagccataaaaagaatgaaataatgtcttttgcagcaacatggatcaaactggaggccattatcttatgtgaaataagctagacacaaaaagacaaataccacatataagtgggagtgaaataatgtgtacccatggatgtagagtgtggaatgatagacagtggagactgggaagggtgggagggggttggatgatgagaaattacttaattggtacaatgtatgttattccagtgatggatacctggaaagtcctgacttcatcactatgcaatatatccatgtaacaaaattacactgtatcccatacatttatataaatgaaatgaaaaatgaaagaaaataggagtttaagtaccatatgtgttacaactagctgtgcaatcctggacgagtcagttctcatttctgagcctcagtatccctatctgtagaaagtggctaaaagttgctacctcataaggcttaatattattactaataatattaatagatgaatagtaatatatttccgattactaaactttatagaggtttttataatttataagcactttcatatataataattttatagggatgtatatttatctatatttctgaaaggactttgtaaattctgaagcactacgtaacttgttagttgatagttccataaccagctaaatctgatttagtgactgtttttatccttagttatttgaacaatgaatcagaattttctaagctcagataatgcacttaactcaatttgttcagctaaaataaaagttttggaatgttttttaactagtgttaagatttgttttaaaattagattgtaacgacatctggcttttatattattatttaaagatgtagaaatggtgatgtagtaaaaatcatgagtggttagtagttgggggctagtgtcatttttaggagttgcagtgatgaactctatccactaaatttagtgatggatcagtgtagttcttttaaaataaatatttagtactttatgtttacagaggaccctgcaattattagttagcttataccaatatttattgctatataaagggctgggcaagtgcctataatggccacctttggagaggatttacaggcacctttgagaaaacttcttttttttttgaagatggagtcttgctctgtcacccaggctggagtgcagtggtgtgatctcggctcactgtgacctccacctcctggattcaggcaattctcttgcctaagcctcctgagtagctgggattacaggctcccaccaccatgccctttttaacagctaatttttgtatttttaggagagatagggtttcaccatgttgaccaggctggttttaaactcctgacctcaaatgatctgcccacctctgcctcccaaagtgctgggattacaggcgtgagccaccgcgcctggcctgagaaaacttctaactctgagtttagttggtttgtctgtatactgtcaggaatctgcaaagcttatttgatcgtttatttgtaccagcattttccctgagaagttattctgaaaaatactctctctcaaaatgataaaaaccttttctgtgcatttgtttcagaatcttaccgcttctaggacctagaacttctttctgaagtgtaacctaaatatttgccttaagaagttaaataactaatatttttagtgtaaccaccatttaaggcatttaaaaaaaatgaaatagtctgctttcaagactcttgtttctattatggatataaaacatatttttaaaaagatcaacattataaggtagtagatagtaagtattaattaggtgtttgtggcagatactgttagttgcctacccaaaacttatttccattttcaccttgttaatagaaccctaatcgtgttttggtagctgtgtgcccagcctcagttcatgacagtcatgttttctgatttcccaacttcttctacaactgaggatagccatgtgatcgagttctggacagtgttacctgtttagctctccattttttttctttccaacttttatttaaggttcagggggtacatgtgcaggtttgttatgtgggtaaattgcatgttgtgggggtttggtgttcagattatttcattacccaggtaataagcatagtacccagtaggtagtttttcagtgcataccctcctcccaccagccaccctcaagtaggcccccgtatctatggtttccttctttgtattcatgaggactcagtgttgagcttctacttacaagtgaggacatgcagtatttggttttctgttcctgcattaattagcctaggataatggcctccagctccatccatgttgctgcaaaggacatgatttattcttttttaatggctgcatagtatttcatggtatatatgtaccacattttctttatctcgttcaccgttagtgggcatttaggttgattccatgtctttgctattgtgaatagtgctgtgatggacatatgtgtgcttgtgtctttatggtagaatccttatattcctttggttatatacctagtagtaggattgctaggttgaacgatagttctaagttcttcgaaagattgccaaactactttccacaatggctaaacttattaacattcctaccaacagtgtataagcattcccttttctctgcaaccttgctagcatctattattttttgagtttttaataatagctattctgactggtgtgagatggtatctcattttgattttagtatacatttctctaatgattaggaatgttgactttttttttttttttttttgagatggagtcttgctctgttgccaggctggtgtgcagaggtgcgatctcggctcactgcaatctctgcctcccaggttcaagtgattctcctgcctcaggctcccacgtagctgctaagcatgccaccacacccagctaatttttgtatttttttcatatgccttttgattgtgtgtttgtcttcttttgagaaatgtctgtttatgtcctttgcccatttttaatggatctgtttgtttttacttgttaatttcctcaaattctctatagattctggatattagatctctgttaagatacatagtttgcaaatattttctccctttaggttatctgtttattctgtttatagtttcttttgttgtaacagatctctttcatttaactagatcctatttgtcagtttttttttttttcaattgcttttggagcctttgtcatgaaatctttgccatcacctatgtccagaatagtgtttcctaggttttcttctatggtttttgtagttttaagttttatatttaagtctttaggccatcttgagttggtttctgtatatggtaaaaggaaggaatctaatttcagtcttctgcatatggctagccagttatcccagcaccatttatttaatagagaattcagtaaatgctgctgggattacttgttttcataaactttatcaaagatcagatggttgtaggtatgtggctttatttctgggttttctaacctgttctgttgttctgtgtgtctgctttggaccagtaccatgctgttttggttactgtagtcttgtaatatactttgaagttgggtagtgtgatgcttctggctgtgttataatatttttgcttaggattgctttggcttttcaggttctatatgaattttagaataggtttttttccaattctgtgaaaaatgttggtagtttgatagaaatagcattgaatctgtaaattgctttgggcagtatagccattttaacaatattgattctttcaatccatgagcatggaatgtttttccatttgtttgtgtcatctctgacttctttcagcagtgttttgtaattcttgttgtagagatttttcacctccctggttagctgtgttcctaggtactttttttgtgtgtgtggctattgtgaataggattgcattattgatttgactctcagcttggctgttgttggtgtatagaaatgctactgatttttgtacattgattttgttttctgaaactttgctcaagtcatttatcagatctaggaacatttgggcagagattataaggctttctaggtataaaatcatatcacctgcaaagagagatttcctctcttcctgtctggatgccgtttatttctttatcttgtctaattgctctggctagaacttccagtataggagtggtaagtgtgggcatccttgccttgttccaggtctcaaggggaatgcttcaagcttttgattatttggtaggatattagctgtgggtttgtcatagatgagtcttcttattctgcggtatgtttcttcagtacctagtttattgagggtttttagcacaaaaggatgttgaattttattgaaagccttttctgtgtctgttgagttgatcatgtggtttttgtttttagttttgtttatgtgatgaaccacgtttattgatttgcatgttgagccaaccttgcatctcaggaataaagcctggttgattaggtagatgagctttttgatttgctgctggatttggtttgcttgtattttgttgaggatttttgcatctatgtttatcagggatattggcctgaagctttcttttttcattgtgtctctgccaagtattggtatcagcatgatcctggcctcatacagtgagttaggagggagtccttccttctggatttttgggaatagtttcagtaggattggtatcagcttatttttttacatcaggtgggctttggatttgaatcaatctggtccagggttttttctggctggtaggctttttattactgattcaatttcacaatttgttagttgtctgtttagggtttcaatttcttcctggttcaatcttgggttgttttatattttcaggaaattatccatttcttctaggttttttagtttgtgcacatagtgatatttgtaataatctctgagggttttgtgtatttctgtggggttgctggtaatgtcccctttgtgtgttgtgattgtgtttatttgaatattctctcttctttcccttccttccttccttctttctttctttttttcttttttgacgaaatttcagtcttgttgcccaggctggagtgcaatggcaccatctcagctcaccacaacctctgcctcctgggttcaagcgattctcctgcctcagcctcctgagtagctgggattacaggcatgtgctaccatacccggctaattttgtatttttagtaaagacagggtttctccatgttggtcaggctggtcttgaagtcccgacctgaggtgatctgcccatcttggcctcccaaagttctgggattacaggtgtgagccactgtgcctggccctggatcttctctcttttacttattagtctacctagtggtctatcaatcttattcatttttttcaaagggccagcttttggttttgttgatcttttgtatggtttttcgtgactcaatttcattcaattcagctctgatttcagttatttcttgtcttctgctagcttcggagttggtatgctcttgtttttttggtttctctaggtgtgatgttaggttgttaatttgagatttttctatgctttagttctctactgctgcttaatattttgttataaaatatagtaccttaaaacaacaattataatttattatatctcatggtttgtgtgggtgagtaattcagataaggacttgtttctgctccatgatgtctgaggcctcagctagaagactcaaagactgaggctggagtcatatgaaagcttgttcatgccattttttagttaatgcttgtacctgctgggggtccagctggaacattcacatgtggttttaatattatcactgggtttttttatgaccctgcctccggagttatttagcatcacttctgctgtactctattagacaagactgttaaaaatctcctcctagacttacagggagagaatatgtccccttctgtcagttggaggagcatgtatcatgttgtagaaagaaagtattaaacagaataaatatattgaggtggtcatctttagaaaatacagcttactacagcatttaagggaaggtttattgttggggggctgtggcgctgttgggcagtgatgttttaggcatgatcctttgttgcttattccttcttcatgcctcaaaggagcagcaaccatcttgtgcccataaggtgataaatcaaccgctaaggattttgacatcattggaagtcagtcctggatgatccatttccaggcttctttttttcctgtgtggaaaaaaatacctatttgtttaaattactatattaaggattttgttttttaaaaccaatcataatccccaaatgtcatggttgtcaactttgaggatacataggaatcacctgtggggcttgttaagatacagattgcttggccccatgttagagtttctgattcactaggtctggcataggctcaagaagctggatttgtaacaggctctctggtgttgtcaatgctgtggtcttgggactgaggtatgggctttgagacttcagagaagagtgggtggctagggctgaccttaagggaaaggtggaacttgggaaaaatagatgagatttagacaggattagggaagcaattccaagtattacaaatggtatcaacaaaaaacatgatagcagaaaaagtgtacttttttgttttttaggatttctgtgagtaaattagcttacttggagcaggagttttgtttttttttttttaactgaggatgggagattaggttaaagggaaaataaggactggattaaggtccttggaagccagagagacatttgtttttttattttgtagctagttaggaactgctagaagttttcatagagagtagtgtggccacagcagtatgctagcagacacctatgtttggtggtggtagtggagtgcatttagttattaaacaaatttaaacaaatggttcttgagcatttgtgatgtcttggactcagttctatgaactgggaatacaaaggtaaataagacgtggatcctgccatcaaagagcacggtctagtgcaggaattctcagagtgtgggtgagtacccctgggggtccctgagaccttttcaaggagaaaagattaaaagtattttcataataatattaataattctaagaattctgagacactgtttacttttttgtcattctctttcattagtgtacaagtttttcagaggctttgtaacataggatgtcatcattgctcatatagctaatggaatacaagcttgtgtattaaaacttttgttttaatttcttaattataacttggtaaatactgatagacataaccccctaaacaaaagctctttggaatcttcagtaatttttttaagaggtagagtcgtgaagccataaagtttgaaaactgctgttccagagaatagattggaggagaaaacacatgaaaaacaaaagactaacactctagatgtgaggtaataagagcttaaactagagttataacaaatgaaaagtggaggaagagatattttgtagacactgaagagtggaaaaattgataatacctagtgtaaattatggtgtgggaaaacggatactgctagtgaacatgtaaattagtaccagccttttggaggaacaatttgacaaaacttattgcagactttaaaaatgaatctttcctgtgacttattctgtacttatcataaggaaacaaataagaatatatctttgcggttttgtttgtagtatcagtaaaaatttataagaagcctaagtatcagaggagtttgattaaataaattattacatcaattcaataaaatgctgtgtagtcactaaaaataatgatgtgggtgaatatttaatgtaaaaaattatatacttttttgttgttgttttgttttggattttttgagagagggtctctgttgcacaggctggagtagcgtagcacgaacatggctcactgcagccttcacctcctgggcttaagccagggactacaggcacacaccacacacctggctaacttttttaaaaaagttttttttaaagatgcggtctcaccatattgtccagactggtcttgaactcctgggctcaagccatcctcccatcttggccttccaaagtgttgggattacaggcatgagccaccacatgtggccaaaaaatactttttataaatacctcagttgcataatgttttctccattatcaacttgacaggcctttgtttaaggtttacggttataagtacttatttgtgtaaaatttaagatctatcaatatgtctaatttttcagaaatttttttcttcaacattttagcctttggcccattttcaaattgtatgtaggccaaggcatacacagtggacattgtgcagctgcgtatacgaatatagccaacattaagaggtcccttgcaataatgctgtttcagaaaggatgtttactgttcttttgaacatagttttcttgtttctgctttaacttataaatatttctcgggaggctgaggcaggagaatggcgtgaacccaggaggcggagcttgcagtgagccgagatcgcgccactgcactccagcctgggcgacagagcgagactctgtctcaaaaaaaaaaaaaaaaaaaaaaaaaaaaaaaaaaaaatatttaaataaaaataatgtttcactgaagaaattgtaaaagtgaactatatgttaaaaataatctaggaaactaaattactgctattccactttgcagtttgatattgctcattttttgactcgtaaagtcagtgtcgatgccttttaactttttttttaaaattttactggatttgtattttaccatatttgtgcagtgactttgattaggtaccaattgaattcagattaaaaagcataaacctacatctgaagatagcctagtataatttatattgtgcatcgttctgattttgaaataataattctcctttacaacgttagggctgaataaaagatagaatccttatgaaatagtgagcccaatgtcattttttttttttttgagtcagagtcttgctctgttgcccagactgtagtgcagtggcacaatcttggctcactgcaacctccgcctcccaggttcaagcatttctcttgcctcagcctcctgagtagctgggaccacaggcatgctccaccacacccggctaatttttgtatatgtatttttagtaaagacgaggtgtcactgtgttggccaggctggtctcaaactcctggcctcaagtgatccacccatctgtgcctcccaaagttctaggattacagatgtgagccaccgtgcccagccccagtctcattttggaaatagagcagagacagatggaaaactgttagcccttggtgatgttattgagcagtgttatctgtgggtttccagatgtgttaatatatgtattttcttattaagtcctttgcattgaaatggtggtgcatggactggcagcattagcattacctatgagtttgttggaaatgaggaattttagactgtaccctagttcaattgaatcaaaatccattttaataggatccccagataagtcatatgcacacaaaagctggagaagtattattttacaccactttgagttggatttttatttactcgcaactggatgcatcctgatatgacattctggagttgttgtttgttttcttgtttgtttttcctgaagaggtacaaccttctccaggcatgctattgtgaatattggaggggtgccatttctgattataatagaaacagcatttgttgagtcatgatacagtttaaatagttctcattatactttgatatgatttttttcatttttttaaatggttatttttagatgaaacctaaaactgtactctttactacttgtggtaaaaaagaccctaccgttatttttggcaagtcaggagatgtaaccttagctgtgctggttaaaagccagctttgagagttgcattttacctcccttagaattactccttcccattctttcctcagctccattcctatttcaactagatagttttgtactggacctgtgttccagaaccattactgtctggggagcgactcttataaactactgccttttagaccagatgtgtgtttcagttacatgaatagagaaaagaatgtcatccccctgctatagctgtgtatatgatagcatgaagaaattaaatccaccagcaatctaggaattttcagaaaatttattttcttctactctttatacaaagccaggtgccacattccataaaaagcaaagcatattttaaaattgtacttcttgtttgtccatttatttagagggcttaattagtctgtagccagatattttggatgattcaattcacaaattagattatcgttctgtaattaactgagaatgatctctctgtggtgtgctttatagtgagaattaccaaaggtctgtattcactcggaaaggtcttagttttaaaagcagtctttttaaaggaaatgtagctatgctcattgattttgttattgttgtcctttgagtttttatggtacactaggcattatgctaggtatatgaaaatatgtctctaatccctgttttagacatgataacattgaggctagagagattatgtaacatgcagaaaattgtatagttatatgaacccacggctggtgctcccaaaactcattcatccccttgaggagttcagattctactgattgggagagaaagagctcactgtaatagaatgcaaaatgtagtaaaaattttaaatgaagtaaattgtaaaagtagagatacaaacaatttagtgagaacacagaggaagaagggattaactgtgattaggaggatcaggaaaacataatttatcttctctcctacttctctaagtttttttttttttttgagatggagtctcactctgttgcccaggctagagtgcagtggcgcgatctcggctcactgcaacctctgtctcccaggttcaagtgattctcctgcctcagcctcccaagtagctgggactacaggtgcctgccaccatgcccggctaatttttgtatttttagtggagactgggtttcaccatattggccaggctggtctcgaactcctgaccttgtaatctgcccgacttggcctcccaaagtgctgggattacaggcgtgagccactgcacccggccttacttctctaggtttttaagctcctcctgacttcttaatcttttaatagtatcgtaagtttttcagtaatcaagatttaaatctttgactgtttgtcttcatattcttacatttcatcaatctgtaatgccttttagttcttactgaaaacagtttcttggtagttatcccctaccatttccactgctgtcaccctagttttacctattgctgtatcatctaggccagtgattatcaacctttggtggacctaagaatcatctaatggtgctttgtcaaagtataaagagattttgacttattagtttaaggttatgggtgattcatcaaagttgagaaatacttatctagggcagtggtcttcaaaatgtgatcttgggactgctgggtgtctctgggactttatcaggtatctgcaaagttaaaactattttcgtagttagactaagatgtcatttacttttttcattgtgttgacatttgcactgatggtgaagaaaatagtgatggataaaacttgtagtgccttagctcaaattaagacagtggtaccaaattagtaatcaatgcattcttcactgccacataccagttttgcttaataatgtctttaatgaatcagttaaaatattattattaatttttttatttttaatttttgtgggtacatagtaggtatgtatatttatggggtatatgggatattttgatacaggcatacagtgtgtaataatcacatcaaggtaagtagggtatctgtcacctcaagcatttatcctttgtgttacaatctagttatactgttttagttatttttaaagtacaattaaattattattgactatagtcacctgttgtgctgtaaaattcactctttctatttttttgcacccataaaccatccccacttctctgccccactctccactactcttcccaacctctggtaaccatcattttactctttatctccatgagttcaatttttttttttttgagatggggcctcgctctttcacccaggctgaagtgcagtggcatgatctcggctcactgcaacctccgcctcccattttcaagcgattctcttgcctcagcctccagagtagctgggatattaggtgcataccaccacgcttggctaatttttgtatttttagtaaagacgaggtttcaccatattagccaggctggtcttgaactcctgacctcaagtgatccacccaccttgccctcccaaagtgttaggattataggtctgagcccctgtgcccggccaagtgttttaatttttagctcccataaataagtgagaacatgtgaagtttgtctttctgtgtccgacttattttacacaacacagtgaccttcagttccatccatgttgttgaaaatgacaagttctcattgtttccttatggatgaatagtattccattgagtatatgtaccacatttctttatccattcatctgctgatggatacttaggttgtttcttttctcttgttgcttttaagatctttttgtacttttttgccatgcataaatttttatgtagtaaaatatatttatattttcttttattatgtctaaattttagtcatagttggagagactttcattgcactgaggttagagaggaagacactcatgttttctgcaattatgcatatacagttgatcctcatttttttgtagacttggtgtttgtatgtttacctccttgtcagagtttatttgtaacacccaaattaatgatcttgttggtttcatggtcatttgcagacatgtgcagagcagtaaaatatggagtcaccaatgtgcatgttcccatctgaagctgaataaggtgatatctaccttcttgtttcagctgtcatattgtaaacaagtgttctttttgtcggggatgccacctcttccaaaacacatggtctgagagtgtggaggaatagttttccaaaagaaatagggtatatcaaatactacatgttctcacttctaagtgagagctaaacatcgggtattcatggacataaagatgggagcagtagacactggggaccattacagggggaagttagagggtgggcaagggttgaaaaactaactactgggtgccatgctcactatctgcatgatgggattatttgtattctaaacctcagcatcacgcaatatacccttgtaacaaacctgtgcatttatacccccaaatctaaaacaaaagttgaaattatgttttataaaagaaatggggtatgtttatcagaagaagggggggattaggtgtcagtcagaaacaactgtctactgtaatacctgagtaagcttttattggatagatttgaattggtgaatgaataaattgggtcttggagaaaggaaagggcttgaatgagttctttcagaataggccttttcttttctcaaaagtaccagcaatagcttcccattttttcagaactgatacctctagctttattggcttttatcatctttgctggagggaaatgacgttgggttaagtattgagtgtgaaggaagatagcatgaggatcttgtttgcctgcagctttattcctgcctgctagacctactgccctttaaagacacttgaaagggcttgccccagctttcctcttgactttagggggcaaaagtatgtcattcttatataagagttggatttataagattgtatatcaaattacatactcaagagttggattttgtttgttagtattgtctaaagttacaacatgtaaatagtctgtgtccttactttctaagcctgccattacaaaaagaaaataatatttcctattagagcctgaagcttttttcctccctagctcttatttagggagaatatataatttaagtgtttgaataggaatagaggaagtagccaaacacttttcaatagtccagctaaaatacacaatagcacatgtttaaagtacatctttggaagaaagatttgaagatccttgataagataatatatcatgtaccacaaaggcatgccctgctaagtaaaagtgggaagaagcagtacatattctattagggggtcagaaatctttaaatagaagtttctctggcaatctggttcccagatagatagttgaaggctcaaagaaatttccaagcttgctagaaatttccatctgctggcttttgtgttgagttaaatgccatcatattttattgcctcatacatttgcattaacactttccctttaaatttacttaaagtattttttgttttgtttcatttttgtttttttttgagactggtctcactttgtcgctcaggttggagtgtagtggagctcacagtttacttcagccttctgagtacctgggactacaggtgcatgccaccacacctggctaatttttgtattttttgtagagacggggtttcgccatgttgcccaggctggtctcgaactcctggcctcaagtgatcctccttgccttggccttccaaagtgctgggattgcagacgtgagccacagtgcctgacagtaatatttttttttttattagaaacataagaacccacctcaaagcttgggcttggaagtctatggaggctttatttattttagccacagacatggataagaggcaatctaagttaaatatgtgcactttggtaccaggccaacctgagttctaaccaaatttttcatgttttagatgtgagacaagttaatcttctaggccttacttccttcatgtataaagtagttattattacttaattcaacaaatattattagtcactcttctatgtgttggggtattccagtgaataaaataatgacagtctttcccttagtgcagtttccattctaatggtagaggacggaggatgggggaggcaataaaaaggaattgtatgttaaaaataataattgctgtaagcagagaggaagtagagcagggtaagggagatactgaatacagaagaaaggaggtgcagaattagggtagtaagggttggcatcgttgagccagtgacatctgagcaaagacttgaatgcagttttaaaaggcttgctctggtattgctgagttgagaatagattgcagggcattaagaataaaataaaggagaatcattaggagcttttcctagtaacctaggcaacagattttcttaggctgttcttgcgttgctataaaggaatacgtgagactgggtaatttataaagaaaagaggtttcattggctcatgattctgtaggctgtacaggaagcatggcaccagcatctgctcaacttccgcggaggcctcaggggagcttttacttatggtggatggcgaagtgggagcaggcccatcacatgacaaaagcaagagcaagagagagagtagagggtgaggtgcccaacacttttaaaccaccagatctcttgagaactcactagcgtgaagacagcagcgagccatgagggatctgcccctgtgacccaagcaccttccattaggccccatttcccatgttggggattaacattcaacatgagatttgggtgggagaatattcaaaccatatcacagatgatgataacttaacgagtattatcagtgaagatgctgaggaatcattgaattttgtatatatttttgagattgagacaacaggatttcctgacgatttgagtatgttatatgaaacaaaaaggagtctatgtttttggctcaggaactgaatggatggagctgttatcaactgataagaggaacactgtggacagagcagatttgagggggaagatcaggagttcagtactatatatatatatattgagtttgagatgtctgtttggcattcttgcagagataatgacatctaccaatgggttggttgtgatgattaaatatggtgaatgtaaattactgagcacagaatctgaccattatctctgtgagatcagagaataaattgctacatgaaacaagaataagagattgcaaaagggagatacttagggaaaaagagctcacagaatgtgatagaaaaaaatttttaaatgatggatgggaggataagattgaagaaatctcccagaatataaaagccaaagagatgtaagaatattacagaaatattaaaaataatggagaatctactcaggaggcccatctcctttctaaaaagattttcagagagagagagagatcaaagaaaagggaagggaaataattttatttatttatttttttgagatggagtctcactctgttgcccaggccagagtgcagtggcatgatcctggctcactgcaacctccacctccagggttcaagcaattcttctgcctcagcctcccgagtagctgggattgtgggcatgcaccatcacacccggctaatttttgtatttttagtagagacagggtttcaccatgttggccaggctagtctcaaactcctgacctcagttgattcatctgcctcggcctcccaaaatgctgggattacaggcatgagccactgtgctcagctaagggaaataattatcagtgaaacaatgcaagaaaaatttccagaactgaaggacatctgtttctaaattgaaagtgctcagcaccattaatgagggggaaaaagacatattaccaggacatttcagagtgccagagagtaaaaacaagtcacaaggaaaggaatagggattagtggagtgtcagacttaactcaaaactaacactggaagctagtagacaaggaagcaataccttcaaagtgctgagggaaaattatgacaaacatagatttctaattccaaccaaatagtcaatcaattatgaggatagcctaaagatatttttttagcatgcaaagtgccaaaaaatttatctcctacacatctccccacaggaagctattgaagtatgtgaaagaaggcatgaaatctaggaaaatggggaatgtaacactggagagagagaggaagtttgcaagatgatggtgaacaaaagtccaggatgacagctgagtagcaagcctagagatgactagtacagattggagcaggaaggtggaaactccagggaagatgtctgtacaaaccaaattaaactgatgcatgtgattattctgaaagagtttcatagtttgttcagacattagggaataaactgtccctaacttaagggagcttacactgtaataaggggtacatgcaagtaggcaggcaattatagtattctgtgaaggttcgtaaagtttagtactgtaggaaaccagaatatgcctccccaaaatgtgaaggattctcgagctgaagacagttaagatgcagtagagctctctgcctaaaagcaggacacagatttacagagaaaaatgtcttgctgtcctccctcctccctttctcccctaaagacaggatgtaaattctttactggaaaaaaaccctttatcatctcagagacggcgccagaggaatctgcaagctgactttactccattagtgccttccatatatttacctttccacggtttcccacctctggaagtctgggactgctttcctttgccttgtcacttctctaaaatttattgttctttgttggatatactatataaaccagactcatgaaccactgccttgagttacttttcactgagggcttttcctgtgtgatatgcaccgtacacgttaataaacctatctgtttttctcttgttaatctgccttctgttatagaagtctgtgctaactacatacttaagaaggttgaggaaaaaatactttttctccccttcagttctctgctgctagatcacccatagttggaatggaggctcagaaacctagtatttagctcctttgagcatctgtaattgaactggcaaagcaagagcttggggctgactgttggattagctgaagaatagtttccgtcatattctagaaaagaaagctttttttttctttttctttttctccagggaatgagtggggttatccatttattgtagtttaaaggatttaaaatccatctatatattgataagcattcatcagtttttattttagtatgtatggtgctatcatgtttataagaatattttgtttttaaaatgactagagcggtacaaaggaaaaaactttagttgttaattttagatgaaaagcaactgaatttcttaggtaataattattttaccctcccaagatacgttttctgtactccattgacttatgccaataaagtaatgttcttccaatttaataatggattttttttcttgttgaatttttttcaactctaacgttattttgttgttggagattgattaaaaaatacaaattttactgtttaaagaatgttgcctaattagttataaatctatttcatctttgcatttttttcttttatatactcatataaaatgtagcagtttgtatcacatcagtatttctcttatataaatatggtttatggttatgtctaatctcatttctcatttggccagttaatatatgcacagataaatggcccataaagaaaaacttcaagaggagaaaaaggtaatctaaatgcatattattattttaaagttctaatactgtgtacaattttatgaagttaagtttctgtaatatgtggtcacccaggggtctgagaacattagttaatccagtcaacaaacattgatggcatatgtgctgtatgacaggctctgtgcttggtcttaggaatacaggacaagttagggcatcattcccaccctccgataatgcttagtccccaggaaaaaaaaattgacatataaacaagtagaggtggtaaaacagaagattaaaggtcctatagatgatatttaccaatgaataaagagagaaggctatcttaagaaaaatatgtagtaagaagaaagaaatggagatagagaacatttgaggaaatggcagacatttatttgtatttggttgtagcatagagtaatggggaagaccggggaaacattgagaaccatctcatagagcaggcatgctacatgctggagtttagtcagtttctcctggaacagtatttctcaaatatgtgtgatcatatgaatcactgagaaagtttgtaaacaaacaaaaacaaccctaacagattcctgaatttcactccagacctggaaaatcagagtccttagaggagggctaggaatccgtattttgttatgtcatgtcatgtcagacagggtatctctgttgtccaggctggagttcagtggtacagtcatagcttactgcagccctgaactcctgggctcaagtgatcctcctgcctcagcctccagagtagctgagattacaggcatgagccactgtgcctggtggaatctatatttttaacaagagctctggtaattattattgtaaccaatttattgaacaagtacaagctattagggtataagcaaatatttttccctcaaatgttctagttgatgtgagactttcctttggcatgtattaatgaaagcaaggacataacccacaaatttcctatgtgcatgtacatatgtgcacatcacacacacacacacacacacacacacacacacacacacacacacacacacacacattttgtggttactaaacagtctaggccaggataaaatttagggaattacagcaggtcctcaaataatgttgttttggtataacattgatgactgaaaaaacaaaaaacaaaaatcccagttcccaactggtgccactctctctgtggaatttgcacattctccccatgtttgcatgggttttctcctggtacttcagtttcctcccctgtcccaaagatgtgtgcattgggtgaattagcgtggcccctgtttgagtgtttatgggtgtgtgtgtgttagtgtgctctgcgatgggatggcatcccctccgtggtcagttcctgccgtgtgctctgactaccaggataggctttgctttcagaaatctccagataattagcttcatatatttctgtgttcaggtgctttcagtttctgcagctcagcaagcgtccagctttggatcaagttgccagtgtgtccttcttgcagatatcttcaccttgcaatctgtatgaccaattattttgaagtgccaacttaatgaatgacccttcgtggtgccagactcctaagctctcccttgccttctcttagttctctctttggtagagttggttgaatgcaccagtgagtttgttacttctcagcaaaccttgggggagatatctgaacctaattgttggtgttctcccttagatttgggctttattgcctcttgctgtcagctttgggccctagttactgattctggaaaaagtggaaaaataccccttaacatcttgttagattatgaataggtaagtttaggaaatattattgcaggtagaagaaaacctaacaggtttttattttctaatgtttaaagagacatttaagtaaaagatctcaatggaattatacctttctttttgttgttgttgttgcagatagtatgtacttaatttttttttttttttaaatttcaataggtttttcaggaagaggtggtgtttggttacatggataagttccttagtggttatttctgagattttggtgcacccatcacccaagcagtgtacactgtacccaatatgtagtcttttttttttttttttctttttgagatagagtcttgctctgtcgcgcggcctggagtgcagtggcatgatctgggctcactacaacctccacctcccgggttcaagcgattctcctgcctcagcctcccaagtagctgggattataggcgcctgccaccacgcctggctaatttttgtatttttagtagagacgaggtttcgccatgttggcaggctggtctcaagctcctgacctcaggtgatccacctacctcagcctctcaaagtgctgggattacaggcatgggccactgcgcccagccgtaatatgtggtcttttttacctcacctgcctcctgcccttccccttaagtccccacagttcattttatcattcttatgcctctgagtcctcatagcttagctcccacctgtaagtaagaacatacaacgtttggttttccattcctgagttactttgcttagagtaacggtctccagttccatctaggttgctgtgaatgccattgtttcatttgtttttacagctgagtagtattccacagtgtgtatggggtgtgtgtgtgtgtatatatatatatcacaatttctttctttctttttctttttcttttttttttttttttttgagatggagtttcactcttgttgcccaggctggaatgcaatggtgcgatctcggcttaccacaacctctgcctcccgggttcaaggaattctcctgcctcagcctcccaagtagctgggattacagtcatgtgccaccacgcctggctaattttgtatttttagtagagacggggtttctccatgttgttcaggctggtcttgaactcccgacctcaggtgatccgcccacctcagcctcccaaattgctgggattacaggcatgagccactgcgaccagcagtatatcacattttctttatccactcgttattgatgggcatttgggctggtttcatatttttgcaattgcaaattgtgctgctgtaaacgtgtgtgtaagtgtctttttcatgtaatgacttcttttcctctggttagatacccagtagtgggattgctggatcaaatggtagatctacttttagttctttaaggaatctccacattgttttccatagaggttgtactagtttacatttgcaccagcgtgtaaaagtgttcccttttcaccatattcatgccaatatctattatactttgatttttaaattatggccattcttgcaggagtaaggtggtatcacattgtggtttggatttgcatttccctgattattagtgatgttgagcattttttcatatgcttgtcggccatttgtatatcttcttttgagaattgcttattcatgtctttagcccacttttttgatgggattatttgtttttttcttgctgatttgtttgatttccttgtagattctggatattagtcctttgtcggatgcatagtttgctaatattttctcctattttatgggttgtctgttcactctgctgattatttcttttgctgtgcagaggctttttagtttaattacgtcccatctatttatccttgttttagttgcgtttatttttgggttcttggtcatgaaaactttgcttaagccaatgtctagaaggggttttccaatgttatctgctagaatttttatgttcaggtcttagatttaagtctttgatccattttgacctgatttttgtataaagtgtgtcttagtccatttttacgctgctggtaaagagatacccgagactgggcaatttacaaaataaagaggtttaattggacttatagttccacatggctggggaagccgcacaatcatggcagaaggcaaggaagagcaagtcatgtcttacatggaatggcagcaggcaaagactttgtgcagagaaactcccgttcttaaaaccatcagatctcgtgagactcattcactatcatgagaacagcacaggaaatatccacccctgtaattcagtcacctcccactgggtctctgtcacaacacgtgggaattcaagatgaaatttggtggggacacagcaaaactgtatcattccacccctggagcctcccaaatctcatatcctcacatttcaaaaccaatcatgccttcccaaaagtcccccaaagtctcaactcatttcagcattaactcaaaagttcacagtccagcgtctcatcagagacaaggccagtcccttccgcctgtgagcctgtaaaatcaaaagcaagttagttacttcctacatacagtgggatacaggcattgggtaaatacagccattccaaatgggagaaattggccaaaacaaaggggctccaggccccatgcaagtcaaaaatcaagcagggcagtcaaatcttaaagctccaaaatgatctcctttgactccatatctgacatccaggtcatgctgatgcaagaagtgggttcccatggtcttgggcagctatgcctctgtggctttgcagggtacagcccccctcctagctgccttcatgggctggcattgagtgtctgcagcttttctaggtgaatggtgcaagctgttggtggatttaccattcttcttttttttttgagacagagtctcgctctgtcaccaggctggagtgcagtggcgtgtgatctcggctcactgtaccctctgcctcctgagttcaagcaattctcctgcctcagcctcccgagtagccgggactacaggtgcctgccaccacgtctggctaatttttgtatttttagtagagacggggtttcaccatattggccaggttggtctcgaactcctgaccttgtgatctgcctgcctcagcctcccaaagtgctgggattacaggcatgagctactgtgcttgacctggatctaccattctggggtctggaggatggtggccatcttctcacagctacactaggctctgctccccagtagggactctgtatgggggctctgactccacatttcctttctgcagaggttcttctccataagagtcctacccctgcatcaaacttctgcctgggcatccagatgtttccaaacatcttctgaaatctaggcggaggttcccaaaccccaattcttgacttctgtgcactggcaggcttaacactgcatggaagctgccaaggcttgcggcttgcaccctctgaagccttggcttgatctctcattggctcctttcagccatggctggagtggctggaatgcagggcaccaagaccctgggctgcacacagcctgggccgcacacagcacagggaccctgggcccagcccatgaaaccactttttcctcctaggcctcctggcctgcggtaggaggggctcccatgaagacctctgacatgccttagagacattttttccattgtcttggggattaacatttggccccttattacttatgcaactttctgcagccagcttggatttctcctcagaaaatggattttcttttctatcgcattgccaggctgcacattttctaaacttttatattctgcttcccttataaaactgaatgcctttaacagcacccaagtcacctcttgaatactttgctgcttagaaattttttacaccagatacccaaaatcatctctcttaagttcaaagttccacaaatctctagggcaggggcaaaatgctgccagtctgtttgctaaaacatagcaagagtcacctttactccagttaacaagttcgtcatctttatctgagaccacctcagcctggaccttattgctcatgtcactgtcaacatttttgtcaaagccattcaacaagtccttttttctcttttaaaatagacagatcatgccagtgttgaagggatatgtttccttttttttttttttttttttttttgagactgagtcttggtctgtcgccacactggagtgcagtggtgtgatcttggctcactgcagcctccgcctcctgggttcaagcgattctcctgcctcagcctcccaagtagctgggacaacaggcgtgcgccaccacacccagctaatttttgtgtttttagtaggggtggggtttcatcatgttggccaggctggtctcgaactcccaactttgtgatctgcctgcctcggcctcccagagtgctggaattacagacgtgagccaccacgcctggcggagatatgttttcttaacactgggcaaagaatctcagtttatatagctcactggacaatttacagatcctgaggtcagggataatagtaagtatggattgtgaaaaccttcagtaactcatagattttagccaatgatatgttacaaagtattttatactgtgatattatttcctatgagtcatcccattcctgttatttaagcagtgctcaagatcactatggttcatatccatgaatgtatttcagggtagaataattcttgaatcttatttataagatatactgttgactttaaatgaaagctactcatttaaataggacaccttatataccttggatatggatatttgtttttttctctttaattgtcatattttatatatttatggggttcatgtgagagtttgctgcatgcatagaatgtgtaatgatcaagtctccatcatcatgagtgcttatcatttttatgtggtgtcatttcaagtcctctcttctagttactctgacatatacataatattgttactaagtgtagtcactgtggtctgctatcaaacattagatcttgtttcttctatctaactatgtgtttgtacccacaaccaacttctcctgtcctctccccttgaaccacccttccgagtctctggttatctgttgatctattctctatgtccatgagatgaagttttttagctcccacatgtgaatgagaacgtgtggtatttgtctttctgtgctgggcttattttgcgtaacataatgacgtccaattccatccatgtcacttcaaatgacatgatttcattcttttttatggctgaatagtatttcattgtatgtgtgtgtgtgtgtgtgtgtgtgtgtattatataatatattcattgtgtgtgtgtatatattatatatatacacatatataatgtgtgtgtcttttatggttccatacaaattttaggattttttgtctatttctgggaaaaaatgaatcccacttgatcatggtatgttatcttttgggtgtgctgttggatctagtttggtagtattttgttgaagacttttccatttatcttcatcagggttattggtctgtattttttttgttgtagctttgtctggttttggtatcagggtaatgctggcctcatagaatgagttagggagaatttccttctcttaactttttggaatagcttgaggaggactgatatgagtttttctttatacatttggtagaattcagcagtgactttattcagtactgggctttttttcttgagagactttttgttcctggttcaatcttgatactcattatgttcaggttttctatttttcctgattcaatcttgttggattgtattgatatggctccaatgaatggaggaacaccagtgtccttggtcttgcgctgatttagataaaatgacatggacacatgtggagtgattttaaggagcggagagtttaataggcaagaaagaaggaagaagctcccccatacagagacagagggaggggggctctgagagagaaaccatgtgtgcggtggcaaagtagttagttatattagcaggctggaggaggcggtgtctgatttgcatacagcccagggattggttttaccagatgtgtcattcatgtggcccgtgaaaaacctggccctcccaccttcgtcctttaatatgaaaatgcgggtcaccatgatgtcctgaacacgtgtgagttatctggaggcggccatgacacttggtacttgtggtgacaaggagaagagggcagcaatcgccatgttggccatgttgggtggacctagtttctaatcgccagaatttgcatatcaaagcttgccgtctttaagccgccttttctgttagaaaagaaatggtttgggggttgcttcttacaggaaaatttccaccgagaacctttaccctttctacctgcctaaaaattatttcttaataactcctatattaatgtgtttccaggaatttctccattttctctaggtttttcactttgctagcatataattcataatagtctctgatgatcttttgtacttctggtgtcagctgcaatgtctcctttttcatttctgagtttgtttatttgggacgtctcttcttttttcggttagtcaaggtagcggtttatcaattttgtttatcttttccaatgatcaacgttttgtattgtatttttagtctctatttcatttagttctgctctgatctttattatttcttttcttctgctaatttttggttttctttgttcttgctttttagttttttgaggtgcatggttagattgttcatttgaaatctttctgtttttctgatttaggtgtttattgctataaactcccctcttaacatacttttgctatgtcccacaggttttggtatgttgtgtttccattttctttgtttcaagaaattaaaaaaattttttatcttgattctttcattgacccagtggtcactcaggagcatgttgtttaatttccatgtatttgtatagttttcagagttcctcttggcattgatttctagttttattccattgtgatctaagatacttgatatgattttagctttggaaagattagttttatagcctaacatatggtaaatcctggagaattttctatgtgcagatgagaaaaatgtatattctacagatgttagataacattttctgtacatgtctgttaggtccatttggtctaaagtcccgtttaagtctgatgtttctttattttctgtctagatgatctcttaaatgctgagattgggatgttgaagtaccccactattattgtattagagcctgtctttttctttagatctagtaatacttgctttatgcatatcctcttgctggattgatccctttatcattatataatgaccttgtctttctgtgtcttttttttttgtgtttttttgttttttttaagaaatggggtctcaatatgttttctaggctagtcttgagctcctggcctcaagtgatcctcccgcctctgccttctgagtagctgggattacaggcaggagccatcgtgcccagcttctttgtcttttattattatttttgacttaatgtctgttttatctgatataagtgtaggtatttctgctcacttttggtttccgtttgtgtggaatatcttttttcatttatttactttgagtctatatgtgtcttcacaggtaaagtgcactgattgtaggcagcatatagttagatcatttttaaatcaattcagagagtctgtatcttttaagtggagaatttaatccattaatattcaaggttattattgaggttttgttccttcatattgttaattgtttgctggttttctatggtggtatcacttgaattttttggctttttcacttgtgtattgctttaccagttagttttatatttttgtgtgtatactttgtgtgtgtgtgtgttttttttttccactcccttgagcatttcttgaagagctagtctagtggtgatgaatttcatctgcttttgcttgcttagaaaagactttatttcttctttatttatgaaggataattttgctggatatagtatccttgggtggcagtttttttcttttggcactttgaatatataaccccattctctcctagcctgtgaggtttttgctgagaagtctcctgttgatgtaggctcctttgtaggtgactagacattttcctcttgctgctttaagacttttctccttgtcattgactttatgcagcttgaatacaatgtgtcatggagaagacctttcgcattggatcactggtcttcctgtacctggatgtctaaatctcttggtagacttgggaaaatttcatctagtatttcattaaataggtttttgagcatttttgttctctgtttccctttgaggatactgataatttatatatttgattgctttatggtttcccatatatcatgacgactttgttcattcttttttattctttattcaattttttttttggtctgcctgggttatttcttttttttttttcttttttttgagacggagtctcgctctgttgcccaggttggagtgcagtggtgcgatctcagctcactgcaagctccgccgcctgcattcatgccattctcctgcctcagcctcccaagtagctgggactacaggagcctgccaccacgcctggctaatttttttgtatttttattagagacagggtttcaccgtgttagccaggatggtctcaatcgcctgacctcgtgatccgcctgccttggcctcccaaagtgctgggattacaggcgtgagccaccgcgtcctgcctggctgggttatttcaaaaggcccatcttcaggttctgagactctttcttttgcttggtttagtctattgttgatgcttttgagtgtactttgtattttttcaaggacttcttcagttccaaaattttggtttgtttcttttttattctatcactgtggtaaactgctcctttatttcctgaattgtttttctgatttctttgtattgttttttgaaattctcttgtatctcattgggcttctttagtatcataattttgaattctttttctgggatttctttttttttttttttttttgagacagagttttgctcttgttgcccaggctggagggcaatggcacaacctcagctcactgcaacctctgcctcccgggttcaagcaattctcctgcctcagcctcctgagtagctgggattacaggtgcccaccaccacgcctggctaattttttgtatttttagtagagatgggtttcaccatgttggccaggctggtctcgacctcttgacctcaggtgatccatctgccttggcctcccaaagtgctgggattataggcgtgaatcacagtgcccggcccagcatttcttgaatttctttttattgggatgtgttgctggagaattattatgttcctttggaggtgtcatagttctttgctttttcatgttttctatatccttgtgttgacatctgcacacctggtataatagttgcttcttcaaattttttatttttttatttttaacttttcttcaacttttgttttagattctaggggtacatgttcaggtttgttacaaagttatattatgtgatgctggagtttggagtacaattgaacatgtcacccaggaagtgagcacagtattcaataagtagttttcaatctttgtcttcctccctccctcctacctcatgtattttccagcatctgttgttcccatctttatgtccatgtgtacccaatgtttagctcctgcttttggattttctttcataggagatgtatcaatggtgctagttgggtgggctctttggctttgattctgggtgcattcagttgtgtagtctctgtattatttctttagctataaacaatatctgtgttatctgtgatttcctccatggtttatggtgtggttattagtggagcttatagtgaagtttggtgggacagggatgctaggcaggccactttttgggccctattggtggtagcggtgggctgatcatacttgttcttaggccccagcacagtgtgcagtggcactagttttagtgggaccaagaggttcaattcttggctccccaggtggcttgctcagatgctgaggtggtggtggcagaggtggggtgggcaggtgagcaagttctcatgtccctgggaatttggtatggtgtgggtagtggcagcagcagtgaggagaagaccctctgggtcccaagcagtatgtgctaatgttgatggtggctgtgatgcagggtcactatccacagccccagacacacagctcttagacttgtccactcttggcagcaacagtactgtactgctatgccaaggaggggaggggccccatgttcacgtatgagtctaagcatggaggccacaccaccagtgggggcacagttactacttacagccccagacaggcagctcctccggcttgtccaccctggcccctggcaatagcagcagtggcagcggctgtagtggtgtgcagaggaggagagaggctcctgttgtatatgtgtaaacctgagcacagagaccactccattggtgcaggcagggtcactgcttccagctccagacagctattatgcttacccatctgggttcctagtgacagctactgctatggcaatatgcagagaaggggaggagatctttccacttgtgagcttgagcacagaatttgtgctgcctttccggtagaatgcacctttggtacactgtaactttttggtacactgcaccattccctgaggagtagtgttttccatgggctagaatactggggaccctggagcacctttgggtccagccagtgctatgctgctgtagccatttgagtcaacactggggttgttagtgggagatcccagaatgtggagatatggggcctctgatttccaggtcaggatgcagtcctatgacagctgtgctctcacagtagtgctctgcagtagcagcttaggccttgggggtgtgactgacccagcatgagttccttgtctggtgcaatgcccttgtgggtctccagatcaccacccttgctagtatcagggtttgtgtgggtagaggagctctcccatggtttggattgctgcagtccacagtggggacatggattgttaaggttctctcacttacccttccctatgataatgagtcccttggggctcatagctgatcttggctgagttggtcacttgcttccttctccttctttgcctcaggtgtttcctgtgactagatcctgttggacactagtgttctcttctagatgttctattataggtgtgattattttggttatatattagtaattttggttctttctggagagggtgagtgtccaatctctctagttagccaccttgaatacatctctgctgaggagttcaggaagagcagaagctacctctatgctcctgctgagtcaggcaatgcctatacctttaattctaccagaattgaagtaacaaatttgtctactttagggcaataaataaagtcaatatacacctgactacaaagcttcgtagactatcaacatcagttacttctgacagcttggttgtagatgtgaaaggaaatgggttcattgtatctgatgctgccgttagaccaagctggcaccacagaagacctggaatttgttaatactgcttaactttcatgtttcctggtacaatcaggatgaagggaactgtaaccactaggtggcatcttttaattagaaaactgtgaatactccattgctcactaggatccttgtggcctacttagcaaagcaattgcctgtgagagcagctggtggcagtctttaagatgcagatttcaaataggagagaaaggaagagataaagataaaaagagaggaaagaagtgggagggcaagagaagagaaaaggagaaagtaaacaggcgtactgtgaaggaagtagtaaaatgccatcagtaattagctcaggaaagtggtatttatggcatttgttgcttaccattgtttcatttctttatttatttgacacgtatttaatgggaattaggaattctggctgaggatacgagatgctgtttctaccctcagagagttgatagctaaagggagtttaaaatatctcaacttaaaatcttgacccccttcctgtagagtatgttaaataatacatgaaataataccttttatttttagttttatttgtttcgtattctctatttcattcccctatcagagaaaagagtttctggagtactctagttgacatactttgaaaattagccccttgagggcagggagtgtatattattgaggaatctggagcatgttgttccatccctgactcttattgatgggggggaatgtccatacgttgaacgaatggtaggatcagatgagaaacctcagcaaggtgtctcctggttatagtctacagccttcctggctctttgtagaatttaggcttctgactttgaatgctttcctgacagcaccatactctcctctgctatatagcacactatcatattgcctgtttacgaggcatttgtgtttctccacagtgatgaattcttttatggtagggtctgtttctaatttaatttatttatgtagtttcagtgtttagcaggtggtgagtgctcaataaattttggttaaatgaatgaataaatctgactaattatagtgtacttggtataagataaatttgtataggaatccttttggagagagttaatttttggatatgccagaaagaccatcctttaagattttttttacatatgtgaggatgattaggcaattactttgagtgtaagatatggtgcactttcaaagataaccagaagatataccagttgtatgctagagatggatttgtagtgccaattctacaaatacaactcttaaaaaagtttttttttcagagacagtcttgctctcttgcccaaatgggagttcaatggctcgattatagctcactgcagctttcacctcctggggttgggtgattttcctgcctcagcatcccatgtagctaggactacaggcacataccatcaggccatgctgattttaaaatttttttgtagagatggggatcttgctgtgttgcccaggctagttataaatccctggcctcaagggatcctcctgctttggcctcccaaagtgttgggattagaagtgtgagccactgcccctggccaactcttttaaattttaaagtggattctgttgcgttgtcttagataagtagcccagctgcagtcttcttgtttcttttttctaaaataataggcactgatgacatctattatttgctccttcaggatctagggcctgccgaggacttcatcttataaagatgagtatgagaactgagacaaggtcaagtagagtagtaaaaggtgggcagagagggatttcactatggcggaattctattataccagaggataatgtcagtaggccaacgtctgtttgttgaatgccagaactttcatattcaagaatatatattagaaaatagatgtcattttattaatagacctttttagaaaggtctatcttataaaggacacattataaaaagccttcaaaaaacaaaaattttaacagctttttgagatataatttacataccatacaattcacccttttaaggtacacaatatagggttctttttttagcatattgacagattgtgcaacgatcaccacagtctaattccaaaacatttcaccaccccaagaagaaaccctgtacccagtagcagccactctctcactctgcatttccaccttccccaagcccttggaaatctctatttgctatctctatagatttgcctgttatggacatttcatgaaagtggagtcatataatgtgtgttcttttgtgactggcttctttcatatagcataaagttttcaaaattagtgttgcagcatgttatcagtattcttcattccttttcattgccaaataatatactgttgtatagatagaactcattttgtttatccatttatcagttgatggacatttggtttattttcacattttgggtattatgaataatgcagtaataagcatccatgtacaagcttttgtttggacatatgtttttatttctcttggttatatccccaggagtagaattgctggatcatatggcagctctgtgtttaataatttgaggaactgtgaagccacttttccaaagtcctaccagcagcgagctagggttccagtttctccacatcctcactaatacttgtcatctttttcttaaaaattacaataatccttgtagtgcttgtgaagtggttatgtcattgtggtttttgtttgcattttctaatggctgatgatgttgagaattttcaagtgtttattgaccatttgtatatctcttttggagaaagtctatttaaatctcttgcccagttgtaattgggttgtctttttattattgtattttaaagtgctcattttatatgttggatacaagacccttaatagatatttgattttcaaatattttctcccattctgtccttttactttcttgatggtcttacttgtagcagaaatatgttatatacacatatatgtaaatgtaatatttatagcataatgaaataaagtagtttagaaggatttgcagtagggtgccatgaaggggataacagttgtcttttattgaaattcaaagctgagccctaaatccatatgtaatacaattatgggaagccaaaaaagaacagaagctgctcagagtgaaacataatgtcctacagcacatgacacaccttcttcctgtctttgtgatatcccagttacaagctagttagagaaatgatagggattggggtagtgagaaaagaatagttgtttcctttggtgtctcaggtaagatatactgttagagatatagctagaaataaaaccaaccggttctagcagagatgacgataattctacttttgtcaaatcaccaccagagaaatctcctctcagttgattaacatcatgtgccgcaggctgtttctttcttttactctaggtatagtgggagtaacccattggcaagaaaaactcatatttaggtggtaaggggaaggcaggtagagaaaatgaagtgtgtctttgacacagtatgaatggaggtgctccccattaggaattgagcaggtagactgtgttgatgaacatagagtaacacgctgggatggttgtggccacttgtctgtctcattggtccatctctcccagtattccatttgaaatccttcttcagccccttaccacagcttcaggttgatattgaaatacaatggtaatagtgagggtattttaaaagtggactttaaagctgagttacattaagaaatgggcatatctggcaagttacaggcacaggtaagtaacttttttttttctttttttgcattaggggtttgaaatagtgcaccgatggccttctgagaaaggtgtctaccttctcaaggtttttctatagaatgacttatcaaaatccatatggattcttgaccgaggcttttcagctggattatgtgaaaagctgtggattttgtaaagaagcctggcatgtgctccagtgtgtttcagtttttaaattttcattttttacagtgtgagaactaattccagactaataacatttatgtgaatagttctctaagctttgcttcctaaagtgtaactgttaagccttctggaataacaatgcagttctcccttcagaaagattctttatgttgatgtcttgtgactggcttaaattcttcaggcactttctctcctggttcctctccacacccagagagagattttagataatcttgtgcattgagcagaatcaagagatgagtcaggaaagttttctaacaaataatacttttgacggagccatacaacttaatttcgattttgaagtgacagtaattgtcagtattgctccttcaagtggagggactaatttgtaatcatgagcatattgcataatggcgacataattgagggcgtaggcctatcctttagaacatagcccccaagagaattgtgttccatacataatataaagatatgttaaggtggttgtgaaactccttgctgtgaaatagtaggggcttctcagtcattttgtgtatagtttgctttgtagatgatgctgtatttcagtagaaaacagttgatgtctcaatgtcatattggcatctgtggttgagaatagctcaaatactattgaattaaacttgtgtgcgtgacagtgtgcttgcccagacggactccttagcactgtatgactcttgagaaaatggtctcacttgacaatttcattgctacctaagatttttatttagtggctgaggaagtgaagtagtgacttatactgatttgccatctagggagataattggtaaacttgggcctgagaaaggaagagatctgttatgtaagaaaaatactgatcaaaagaacaatatttgttgttgttgttgaccagctctgactgtgaaacatttaaagtgtctgggctctaatttgagagactagttgaaaaataatcatttgacatttagcactctgctaggtaccgggaaattagagcaagtaagaaataatttcatatcttgaggtacttatattagggggaagacagacatacaggcagatatttttttctgatatattagataaaggctttactcttccccgcccctgcccccctccatgtggaaacacatacaaacaggagcaaaaaagggaataccaaattcattttaaatacatgtagatacccaatatgtaatatgtgtcatcttactctaggatgtgagctttaaaaaggtggaagccaaattgtgcatgcttttgtatagatccttgcataaactagatagtatatagaaaattgacagtagtaagtgaaatgcttgattccttttaagaaagaaaattccaagagttatgttaagaacttctttaaaaaaaggcaagagtgaaaaaaatgcacaattcagaatagtgatgatcattgcagggaggcaggtagatggctttcggtaggggcccatgtatagcttcactgggattgtgtttttagttagcttgggctgctgtagcaaattaccatagattaggtagctcaaataacaaacatttatttctcacagttctgaaggctggaagtctgagatcagggtggaagcatggttgggtgccctcttcctaattatgtcttcacatggctgttcccatcacagggactccagcttcaagacttaatcgaaccctaattacctccctaaaggccctaggtctaaataccattacattggggattagggttttaatacattaattttgggaggacacaaacatttagtccatagcagattggaaatattttaattcataaattaggtgctgggttcattaggtatatattctgtaattatgcctcataacatacattatatatatataaaaaaataaaaagtatatatataaaactgtaacatttgatagatgcatatatatatatatatatatatatatatatatatatatttttttttttttttttttttttttttttttgagatggaatctcactctgttgcccagcctggagtgcaatggcgtgatctcagctcactgcaacctctgcctcccaggttcaagctattctcgtgtctcagcctcccaagtagctgggatcacaggtgcctgccactgcacctggctaatttttgtatttttagtagagatggggtttcgccatgttggtcaggttggtcttgaactcctgacctcaggtgatccaccacctgccttggcctcccaaaagtgctgggattacaggcgtgagccaccgcacccagccttcccagtctgaatttcttaaaagcttttgcttaggttaagttgtgggagaaaaactgaactcacccagctagccaaactatctctctgttgtctttccactttatccatctattttttactttttttggaaacacaataacaatagtgtagaagtcttttcacattgcctgactctcctgtttgtgtcccataaggttccatgtactctgtccagaactcagcttattatgtcaaaggattctgtctggactggtcagtcagagatataagttctcattacctcagtgtgtgtgtttgtatctgtatttaatgatgtttgtgcttggcttaggctggggattttgaaatctttgcagagtttcccaatttgttgggcagttttagaaatgatagtatcagtaggaaaaaaaaaacacagaaaaatacaatttcttctttcatctatgtcccatattatacaaatgttcgctgaaagcaccaattttctgggaaaggttttgactcagacttttttcaccctttacctctactctccaattcatgtttccttcttacaacgtggtcatatgcttgcccaggcctggcttatgaaccgtgcagaatatttgtggggtttgttttttaagccctaaactgtgcacatgatgcagtatttaatttggaatgagctcttagtttagtcacatgtgcttcttgtggtgtttatcttggaatccacaagtaggagggaagtatttttgcattttatacatctggacattgttcatggtccttctgtaacttgggaattctgtgtgaggcaaaatccaaaaaaacagcattaaaaataacacggagttatgatgacatctgagtcaaaacccttgagaatacccttctgatcccagcagagtttgtttttgaggtggtgaactttttcaattgtgtgtggttcactgctggcctgaggagaatgctgggattataaggttacctgacacccttgcatgtagactaatgggtttccagacattctgaaagtctattgcagatttggcatagggggaagattttgctttttggcttagggggaggattttgctctaattttgcatggggtaaaataggtaaagtgaattctgctcactgttgctatgcctctgccacaagcattctaagagacctgtgagactgtccctatttctctcttaaacttgcctaattacagccagcttagagctaaagttgactctgagaatgcctcgggctctgtgtcaggactgggggtttagtaaccttatccttcccctgatttcacatgagaagttgttttaaacaggattggacatagagatatagcacagtacctcctccttttggctaggggtctgctaaagtggaaaaagtgggaaaggatgtacagaaactcctgctctttgagtgagtttgcatatggacagtattgctttttggccccagcctagttttctttcattcccatgtctcatcttttatgcagctgcagagagcaggctgggaaagcagaatgaaagcttcaaacagatttgcacttgaataaaagaaagagtgatttctcttgttcagagtacagaccagtttgggtagaaaactgtttgcttttttactttctgggtaaggactgtttgcttttctctctttaaatgtagtaaagagaggaaaagctaataaagtagttggacctgctggttataattcatagagaattttcaagtgtgtttaataaagtctctcatataattataacagaaataagtaattggaggggaaaggttaaaatcctgtagaggtttaagaatcagttaaatatgaggcagtgtgcttggatgagacaactaactaggagctgcttctctttgctgatttctctgaactttccttttgagattttttcctctttactttcgtaatgcattttgcaactttcattaaaaaaatccatcaatgtttaaacttctaacaaataaacatatcctagtcctattatggaaatcacaatgtagcagagaatagcttgacttcagctagagagaggttaatgataggaaccctaaggattgataccaagatcatgcttgtttagtgttttaatgactccagaaggaaatggtgaaatctgctgatgacaccaaattgtttttgctgatccaaacaaggatttctgggaagcttcttcagagtatttggaatagtagaagaattgagaaatatggtggcagacacactgaacttaaagtgaaggtttacgtgaagtagcaggagtaacgtcaatacgttgaagttacaaagcctgccaaatcttccaaaaggaagattacggagtctatagtttcatgaaaggaagacttaagacaaagaacatttatacatatagcaaatgaaaactattatgggaatagttgcaattataaagttcagtgacttaaaaatatgatgtctgaatttctttttaaatgtcagcagtagtatatctaaataggtgttgtttctctcgaaatggtcatagaagattatatacccattttatgcatgctcctttcttggtacgttcttttgtcagttttctgtggtggcaggtctttattttgcaggctgttttgaattttgaaacagtcaactgtcacttaaagccaagtgtgataaataagatgggtggtcaaactaagtaatagatttaaatatattaaatatattaaatgaaatataaagtagtaaaacttattttcttttattgctttcaaaagtgattctaaaggacattaccaatgagaaattgcaaaaatgtttgtgtactaatagtgttagattaagttcttggttgatagatttcacaaacatcacttatttagatatgtaagttacagggcttgtactaatacacattttattatattggagacaaaccatgtttataagtgacctttttaaaatgttttctttatgctccctaaatatacacttagggaggaagaaggaggttttgaattaactggagatttccctaatgtgttgaatttttctgactaaagcctacatttttgtaaagaaaaagaccctgtgggataaaaaatacgataggcactatcacaggagctgtgggctggccatctatatccatccatctatctattattccacccatccctccatccatccatccatttatttaattaagttatttttaacggttggctctggagttgacattcatttattttaaaagaacagtgaatcatagctcttttcctcaagatgcttgcttttatttgcatggtggcatattgattaagtactcagaacactatttgacatatggtaagccctcaataaaagtttgttattattatgactgtacttctcccctctaatgtatagaggtaaacattttggttcctattgtgacacgtgggttataatgagttagggcctacttaagaagaaagtggaaagaaagcgggtaaaattgttgctcagatactagcatgtgggtggagatatagatatagatataggtatagatatagatagtgtaggtatttacatctaagtatattgtataaagtgacggattctgaatttgctacatttctcatttcttcagcactctgggataaaaccagcaaaaatgatgtgatctgaacagacacagtagatggcgctgtaggacttagtttttaaagaaaacagtacagccagggggagtgggggcatggagtgggaagaaaactaaagcacattttaatgggctcttttgtaccaccaagacaatttcatcttagagtacgtgcctctaagaagtaaagatttttttttttttttttttttgacagagctggagaataattttaggaaaactaaatctccctgttgctatgtttgtgccagctttgtcacttggaaagtattagttgttttaagccacaaatatataaggaagttattttctttcaaaacattgccttatttatgagggttttgtttgtttgttttagctgtctttgtctctgtattttaatatttttgctcctagcttttttggccctttgttgtttcataaaaacgtggttgtaaagttaatttgaaccatatcaatatgactataatgtcatattttaaaattcagctatattttaataggccttaaaaatacaggtttacattaaagagtaacatagtgtttttgatactaccgtagtgtgtttatgtacttgatcttatttaatcttagtactaattgtatgaattttattattcacttttctaggtaaataaactatatcagagatacttagtaacttgccaagctcacatacctagtggttgaactagtagttgctgcaagagtttcgccagcatattaaagttgtattttttgagcacttactgtgtgccaggcaagctaaccactggaaatactatagtgtccaaagctgacctggaccctgcccttatggaccttacagttattagataccccacagacattttttgaaatctgctggattgagagtgggtcatgaagatgaatttgaatcattgtgattgttggataagccagagagccctttcaccaaaaagaaagtaagaatcatacctaccttgaatatattactgtattaaaatatttgttttagttgtactccctgtagccaagggaaaggcaagacctcctttggctacaatgagtaactaaactgtcttctagataagaatcaggaagagtaaggaaaatctggctatactataatgtcaaaattttccactgattaaatggtattaaaatatctaaagcaagaaggtgttagttagcagtggaagtctgagagattaatgtggtttgtgtacagcctaagaccatgttaacttctaattggcttctctagtgccatttggtgagatcttttagagtacagccagcttagtgataccccaaattgccaagtacccctttcatcttgggacattaattgtcaaaaatctttgaattgatttttcttcagaaagcttcactttattattttcacacaataccaagttctcatgatatttatgggtatgtgattggtgagaaaacagaccaagagttgttttttgtttgtttgttttttgtgacgaagtgttgctttgtcgcccagactggagtgcagtggcgcaatctctcctcccgggttcaagcgattctcgtgcctcagcctcccgagtagctgggattacaggcacacgccaccacgcccagctaatttttgtatttttagtagagatggggtttcgtcatgttggccaggctggtttcgaactcctgacctcagttgatccacccgcctcagcctcccaaagtgctgggattacaggcatgagctaccatgcccagcccagaccaagagttttaaattgaggtccatgattgggtttcagtaagtgtatggaatgtctaaaattatataaaattttatgtgtatgtacttagaattattctgggaagaaagtccatagtctgcacaaatttctcagtgagtttcataacccttaaaaggttaaaagtggttgtaactagactttatcaaaaggggtgttcaaaagtcactccagttcaggattgtggaaagataactgtcttctcaaataggcatcttagaggaagggctgtttgggttccttttaagaactgtaatcttgagatgtggagtgaatttgggatttgaaaatcccaaaatagagttttggaactctcagctcttagtgatatattctgttttgaaatgagggatacctttcggggaatttgaaaatacttttttctaattcaacttttaatcagataaatgattatttttgaaaaatgaaatagaaagtaataggaaagggggaaaagttgttatgtctcttcgtggaataaatagctaaagaaattaatttctaaattttaaatttcatccctggttaaaatagttcctcttttttgttgttgttgttgttgttgttttttgttttgagatggagtctcactgttacctaggctggagtgcagtggtgcaatctcggctcactgcaacctccgcctccccagttcaagcagttctctgcttcagcctctcaagtagctggggctacaggcactcgccaccatgcccagctgatttttgtatttttagtagagacatggtttcaccatcttggccaggctggtcttgaactcctgacctcgtgatccacccgcctcggcctcccaaagtgttgggattacaggtgtgagccactgcacttggccaaaagagttcttttagagaaaacaaaagtctttgatataagcaatatgatcatacaaatggatattgtgcttttttaaaacaaacaaaacacacaggtttaaggagagaaggtatggatatactacttctgtcttccctatcttctgccatattctaagctttgcatatgttctcctgaggaacaggatagttataacttaaacttgcatttatatatttctgattaagttgttaactatggttctagatagaagaataaagaagtaaaattagatttcttaatttgatatatttaagtcccttattttgatctaatatatttgataaaatagtaatcttttaatagtagccctgttatacataataataatacctatcagatagggttgtggtgaggattagaccatatagtaaatgtaacatgtctagtgctgtgccctgaacttaacacgtgcttattaaatattaactattgctattaccattatcatcatcattaataaacatctatattttatatccccatgacttaatgtacagtataaagcataaatagtaaaattacccaaagacaaagaggaatgggaaggtccagttgattagcttcttgtttagagaagcagattattccgggggttaggaaatagtttcctgtaaggcatgtttagctttcattcatggattgatggcaatataaatcgctcttttgatgtgagaaaaatataatgatggcattacatcaattataaatttcatgagggtagggactgtgttcggtttaccttgtgtccttagctcccattttaatgtctgacccatggaaggcatttcattaaatatttgttgtcatctgtctatgttttcttctttgtctttctttagcttccaaaaagagttgtttttatattcataatttcttatttcatcagtaatgtgactcccctagaagtattggttaaaatacagatctttcttggaaggagactgttttgtttgaagcaaatgacttgggagatgacttaagaacattcaggctttaggtgtttttgtagaaagactaatatttggtcctaaaaaacaaaaaaaacttatcttcatctgtcagaaaattcctaatgtttagcacttaagttgctttgtgttctgatgtatatattataatggaaaaatctgcagcctaaaaggtagtgttttcaattagatatttaagaaacactttctactctcctactttagaggaaaactttacatagcccatttatcttcatgtcttcttgagtcagcaaaacatttacaactataggaaagaagatgtttttcagaaatgaatgctgatcaaaaagaagtatagctactgtggcaaaattaggtaaatagttctatttgttaaggaaaaaatctgtcttgtggagttgtatataaagtacgaaattgaatatatagttatatgttagtgttcctattgcatactagagtctggatatacataggctcagagtaatttgttatggtccacaggaatatatattttaagatggactctcctaagagtgagaggtgatcctacagccagtggcttgcttggttgtaggatcagatgtgattaagttcagagaggagacattttgaacttctctggttgtagaaatgctgcctccctatttcctacaaatatacagtgaactctggatgtcttctgggacagagtagaaatacttgcaacaggaattggggtctggagatatatgcaacccagcagcactgttataaatattttggttttggtagcaaatttgcttacagtatacagccataccttgtagatatggtgggttccgtgtcagaccatcacaataaagtaactattgcaataatgtgagtgatacattttttttggtttcccaattcatataaaagttatgtttatactacattgtagtctattaagtgtgcaataatattatgtcaaaaaagcaatatataggccgggcacggtggctcactcctgtaatcccagcactttgggaggctgaggcaggcagatcacaaggtcaggagatcgagaccatcctggctaacatggtgaaaccccgtttctactaaaaatacaaaaaaattagccgggcatggttgtgggcgcctgtagtcccatctacttgggaggctgaggcaggagaatggtgtgaacctgggaggcggagcttgcagtgagctgagatcacgccgctgcattccagcctgggtgacagagtgagactctgtctcaaaaaaaaaaaaaaaaaaaaaaaaaaagcaatgtacataccttaatttaaaagtttttattgctaaaaatgctagtgatcatctgagccttcagtgagtcataagctttttgctggtggagggtcccctctcaatgttgatagctgctgactgatcagggtcgtggttgctaaaagttggggtggctgtatcagtttattaaaataagacagcaataaagttcattgaatgatgcttgaatcaattgactcttcctttcatgaaagatttctctgtagcatatcatgctacttgatagcattttactcacagtagaacttcttttaatattgggatcagtcctctgaaaccctgccactgctttatcaactaaatttatgaaatattctaaatcctttgttgtcatttcaacaatgttattagcatcatcacccggaatagtttccctctcaagaaaataatttctttgctcataccttatccctcatctgttcaagtttggtcatgagattgtaacaattcagtcacatctttaggctccacttctaatttgagttctcttgctatttgtatcacatctacagttatttcctccactgaagtcttaaaaccttcaaagtagtccatgagggttggaatcttcttcgctcctgtcaatgttggtattttgacctcctaccattaatcagaaatactcttaatggcatctagaatggtaaattctttccagaagaatttcaattttctttatccagatccatcagaagaatcacaatctatggcagaaatagcattacgaaatgtatgtcttaaatagtgaaacttgaaagttgaaattattccttgatccatgggctgcagaatggatggctgtgttaagaggcatgaaaacaacattaatctccttgtacatctccagcagagctcttgggtggccaggggcgttgtcaatgaattcttttcaaaatattttgaaaagaatcttttcttctgagcagtaggtcttaacagcgggcttaaaatattcagtaaaccatgctataaacagatgtcctgtcatccagaccttattgttccatttctagaccacaggccgagtagatttagcataacttttgggggccctaggattttcagagaatggccagtgagtactggcttcaacttagaaagttgccaactgcattagcctctaccgagagagtcagcctatcctttgaagttttgaaaccaggcactgacttctgctctccagctatgaaagtctgaggtggcattttccccccacctagtgtgaggctgttttatctgtatggaaaatctgtcgttcaggatagccaccttcatcagtgatcttagggagatcttctggataacttgctgcagcatctacatccacacttggtgctttgcttgcacctttatggaatggcttctttccttatacctcatgaagcaacctttgctagcttccaacttttcttttatagctttctttcctctctcagccttcacagaattgaagagagttagggccttgctctggattaggctttggccttaaggtaatgttgtggctggtttggtcttctatccagacatttggtcttcttatcagcaataagactgttttgctttgttagcatttgtgtgttcactggggtagcagcacatttaatttccttcaagaatttttttgtttgtattcacagcttggctatttggtgcaagaggcctagtttttgccctgattcagcttttgatacgtcttcctcattaatcttaattatttctagcttttgatttaaagtgagagatgtgtgactgttcctctttcttgaacatttaggggccattttatggttatttcattttttttccatttttttgtctaacgtgattcagagaaatgtagagttattaaatggactaattttcatatttttatgtctcagggaatagggagcccaaaggcaggcagcaagacaggagaatggctgtcctggtggaacagtcagaacacatagacttatctattaggtttgacatcgtacaggagtgtggttggtggtaccttaatagtaatatcaaagattgctgatcacagatcatcataacaggtatgacaataatgaaaaagtttgaaatattgtgagaataagcaaaatgtgacacggacatgaaatgagcacatgctattggaaaaatggcagtcatagacttgctcagtgcatggttgccacaaaccctgaatgtgtaaaagaccacaatatatgtgaagtacaggtgaggtatgcctgtacgtagttggtgcctgtagttttgtatccattgaaatatactgtcactcattgggtctgcaattgggtgtaataataatatcattttattgttaatgggctttgagtcttcctctttcttctgtgatagtttgccattgtcaagttaaatttttatgagctttttcagagcagaaattaaacattaaatggtttattaaccaaaataaggcaactgcctttagactttaatgtagtacccattttttcctacagcttatcgtcttcccagtttaaaaggcttaagcagaagagtaacagtatagttaaaagtttttaagttacaaagttggaacttgcctttttttgattatatgatcccaagagtcacaagagagtaggcagaaagattactgctttatcaataggtgaaagttcaggtttatctgaatttagaatattaaattgtactttaaccataccacatgtttttataacatataaatcataactgacttcatactattctgttattttatgaggtgatctgatgtggctgcaaagttgttaaagttaaccttgaagaaacctcctatggcttagtgtttatttgcaaaatcaatcacattttttcttctgccttattagactgatgaaatcattttctagcatatggaaacattcctggacctcctgttattttgcgtaaataaccccatgtgactcacaaatgttgaaaaagcagtagatatttccaaatgctattagaaccatcaaactaatacaaaaaattcttcggtgggacaaatgaagaccagaatgaagtctaagtcactgtttccagtgaagattagtcactttttccactctaattccagaatttctttaatttttcttgcttatgttagcaacagtattgtcacaaaagattcaacagtcatctcctcaggtaaccaattgttacacaaaccatatgtagaaaatgctcactggcttcatttatagaaaaaaaaaaagataactggaagttagaaacagttgtccaaacttttgaactataataagctattttgaagtgtcattgtcaatacaaagtacataccagtgtgagattttaagcagtaataaaatctatgtgtggaagagtaaatgaagcgtttctgcaatattaatgaacggacagatatatgggaagaagtgatattaaaccttgccatacactctgacaatgtacatgaacagagccagtttgcttgtaaagattagtaacatatcattgcaatagatgtgcatcctgtggtctaaacttattcctaaatgacatcttgaagtttggcctgtccaaaaacatcttttgaggaaggacagatgctatagctgctttcttcaaggaaaaaaaaaaaagtaagtgacatcacaccttgttttaaacttaatgaagtgaagtaaggatgtcctctgaaaaactggccggaagtaggagtagtaggagggggaggaaaaggagaaggaagagggaaagaagctctttaagaaatagaactagttgaaaatattagtatctaatattgtcaggaacatgacatataagagattattggcagagtgcaacttcagaactcttagaggattctaaaagcaaaggaaaaaagttttttagtttagtttagtttagtttttttgttttttttttaataaatgcttactacttctgaatcagacattctttggcatcttaaactgaatgcctgtaattacattagctgttttgtgagacttacatatattctagtcctgtctagtacagaacactatgctaagcattgcagaaagagcaaaatggatattacttctgtcctcagagaacttatctaggaagaggtagaatataaatattcaaacatctatagaaaaagcagaatcaaccatctaagaggactgtgtagacaagacagatctaatccttttattaacataagtgcttcatgaaggaagtagatgtgaactggacattatggtgtgtgttgaatttggacagattaagatgggattggggtaggagttaggcttttgacaaagaaaacagcatgggcaaagatggagcagaggtggagatgtaggggatatttgggaacaggaagcctgatttagggtgaagtataacttttatagaggagaatggtgggagataaaatggcaagtaaagcttagagccaggtcatggagggttttaaaaatgagaatgaagatttgaactttattctctagcagtggggagtccatgaagactttttagcaagggcttggtaggagctagtagctgtgctttagaatgattaatgggaaggatatagtggagtcgggagaggttagaatcaagaattaaaattaaggggccattgcagaggcccaggtgagagagaataaggcctaacataaggtgtggcagtggagacggaaaagaaaagtgaagcatctggtagacagaatcggtagaactgagccatgattgtatgtgggaagtgagggataagagaattggaacaatatttgcatctgagtaactagggcactggttgtaccattaacagaaagaagaaaattaggaagaggagctgatttgggaaattaagaagatgtattaagtgtttgagatgaatgtgtaggggcatatgagaattgcaaagaagagaaagggacaggaagaaaagactgaaaagaaatgtgtgctttgagaaatacacacatttttgagtttgaatagaagaaaagaaggtggcagaagtggtcaaatcagggagaaagaaatcaggacagcatattattaggaagtctctcttgaggtgtgtgatcttgttttactccaactactgtggttttcattgtccttgcagactcttctgtactccatggttatagtaacgctctaactcaaattaattccattgttctttctattgaatcatcacagaagctgttaggactgataatccacagaatgatatgagggatcagaggcttacattctcaatgccaagattatatatactattcctgaccttaccaggtaggtaagattctttgtgcttaattccgcactcaggacagacttggtgagtctgttgcttattttcctgtatcttattagtgagggaaataatattagccattttgtaggtttggatgctgactctcgtgtttgctttctaaatcagcacctgatctggaaaccaagagatgaaagaatttcagtgagaggctagtcagtagcatcatatggtccactctccagaggagaagacagatgaaggttaagaaaagactccactaggtttggtggttttgaggtcactgatggcctttaagaagatagttttaatactatgatgtgggtgaactaatccaagaagttaaagaataggtacattttaaagaataaactttccaacacagactactctttcaaggatttaggagatgaatgggaggatagagatgaaatgttagctataggatcactagggtcaagggaagacttttttcttttctctttaaattgaaaaaagtaagcatatttgtaggcagaggtaaaggagtatttggagaagaagagaaagaaagtactggggagtagggggttaactgttggctgatagatcttggaggaatctggaacaaatgatatcaagtatataggttgagttattgaccttgggaaggaatgtttagagatcagaggagtaagaggacaggagatgggtggaggtatagggagaggacagatgctgagggaggatatatcagacctcaggcatctcattaaaaaagataaggccattggccaagaatgaggaaaaaagagataggagaaaaggtgtaaaatagttgcagtgggaaataattaaaatgaggtaaactcagctgaggacagatagttgattttatttcttgcctttttctagtaaaattcagttttactagaatttgtttttgcttaagaaagttccatgaaaggctgcattcagaaatatgaagaattttattgtcagctaattcatgctgatgtacatatcttagatccagaaatataaatgatgatagtactattactacttagggctggatcacaaaaagccaatatgcacttaggatttgaaggtactttcaaatgttataaggaaacagtttcatcagggagtagttgtaggaatgtagtttggaattttgtcaagcatatcttttctgtcaatcaaaggcatggttttgtatgacacagtgtctaactcttgcttctgatttcttctgtttatatgaaagatatttctctaggtttggaagtataccaaattacatgcctaatgtgtaaaagatgtttgacttaattcaagaagaccttaattttcagaattggtgatgataaaaatgaaatactacatatatcaattgctgatagttcagaaaaataaaacatattagattctatgtagctaaaattaattgtatttaatgaacttgacaaacactatagaacaaagcagaatttaccagcttagaggactgtgtagacaagacagatccaatccttttgttaacatgaatgtgtcattaagaaggaacatgtgaactggacgttggagtacatgtagaatttggacagatgaagatgggattggggtaggagtttggcttttagcaatgaaaatagtgtgggcaaagatggaacagaggtggagatgtaggagatatttgggaacattctttccctagttcctttcctgaaagtaaggactttaggtagctttttgacactgtggtggatactcagttcaggtaacatctttttttgttttactttaacttggttgtctgttttttagttttcacttgttatacttaaactgggaagaaaatttaaaaaaacagagacaccagattctttaaattttaagagtcagtattccctttcagtttaactgaatgttaaatgttttaaaatgttaagtatctggccgggtgtggtggctcacgcctgtaatcccagtagtttgggaggctgaggtgggtgaatcacttgaggtcaggagtttgaggccagcctggccaacatccctactaaaaatacaaaaattagccaagtatggtggcggccacctgtaatcccagcttcttgagtggctcaggcaggagaatcgcttgaacctgggaggtagagattgcagtgagccagatcatgccaatgtaccccagcctgggcgacagagcgactccgtctaaaatgaaatgaaatgaaataaaataaaataaaataaaatgttatgtgtctactatctataagatgatgatgagcaagataaaattccttttctcgaaaagtatgtaatctgttaagagacatttcacgtaggaaatttgaattatttcagtaaactatactttaaagggcaatcaatatattaaacaatataatcaaaccaagtcatgcataatatcttatattcctattgtaactaagagttgcactgtccaatatgttaaccactaactgtatgtggctattaaaatgaatgaaaaataaaattgaaaatttagtttcactagttacatttcaagcattcagtagctacatgtgattagtggctagtgtagtggacagcatagatagtgagcatttccattattgtagaaacttctgttgggtagtgcagctctagagctatagaacatattttaattgttttggacaggcttgtccttcatctcttcaacaaaccttcattaaatgcctaccatatgccaggtgttgtgatagagtgagatgataaagtcctagttcctccttacacaaacctttcaatcttgtgggacatcaagtcagtgaatgggtgaataagatagaatgtgataagcatcactataagaggagagatacaagaggatgtgaaaatacacaaggaaaagtacagaagcaacacttaaggtttccttttgtagaaaggtgagtaggtgttggcatggttaagttggagataaagcagaatccaactgcaggaaatgcttggatgtgaaagaacatggcacatttgagggactgaaagttgttgactgtatctggagcccagataatttctaaggtctcttaattcacagtcattattaggatacatctaaactatttaaaaaacactccttcctttttcaaaaccaaagggacaaagatccccatgcaccttccatctatttggggagcttcttatttttatatctgtggatcctacagtcaaaggaaggcaagagaaagtgaaaagaaaataaatttgaaaaagaaggaccaaagaaatgaagatggccagaggaagttttagagaaataaaacaggtaacatttgatggagaatgatagtaccatttataacactcggatcgctgtctccagtcagaagtgaacaccaaccattccaaaagctagtgcccccaaatagtttacttggtatgtgaaatataatatgtgagaatattttttgatatgggatttaaaaattgaatttctgccctggttcatttcagcagaaatcatagtagaatttgctttactgtaattttcgtaaatgtatacctttgtagtgtatgcaatatggaagaaatttacattctattattttgtttttatagaatacaaaatagtcacagtcaggttaaaacttacatgagaagtcagagagagagtaggatcaggaaacaaaagaattgtacgttcattcagtcctcaccaattacagagaatattatatgtattatacaaaatacattgcacataataaatctctcacattttgtaaatatttagctgttgttgatttatttctgggctaatggcagccgtcacgtctctggtctgtgttgggaatgtctgtttatatgtctgtgtcacatcatctgctctagcatggaggcttcatggaagacaggaaccatgtctgtttattttgtgtgatagtaacatggagctctatatatgaagctttatttttatttgatgatgatgatggtgatgattttctgtatgaatttctttcctggcttcagattgattgaatcttctgatcactattaatccagtggaactcagaagtggagtttacttttgagtgcttagcctggctaggcagcaggcttttgcaaacacggctatatgagatcttatgccaccacaaagaggcactctcttgaaaaaagatgaaaaatacagagaagccacccacattggttttcatcaaggaaaagtttggtgtctagtcttaccaccaagtgcttgtcaaataaacttggtttgaagtcaagactgaatacagtaaacaaaaaactcagataaaagctatagtaaaaaacaatatttctctttattttcattccttttcttatttgggacaaccttttgaatagtgtgggatgattgaatgtaaagttgatgaggtgaaactgtagccaagtgaataaggtctcagtgctttttaaggatgccctagctctaaacaaattttactattgtatcctacctgtaaaatatttgtctttgtaaacttgcatcactctaaattataaaactgggcatccaaagtcattcatatggacacaactattaagtttagttttatttgttagaatgttcaagatactactgataaggaagcttttaaatatttccttgaaaacctttctttcctctttcaccttgcctctactgccctttctctagatcgatcatgaatttttctattatatttcaaagaatctttagggtttacttgccacatcttctattggagtccatttttcacatcacatttttttgtattaacccattataaatgatactacttcttgtattatttgatttctatgttcatttttatgttttattctataacctattgaggtttatacatataaaataataatcacctgctagtgttaccaatgctgattatgatttttgaatttttagaatgtttgtgtttgattctcctgatttcctttggtcaatatttttttttttttgagacagagtcttgctctgttgcccaggctggagtgcagtggtgcgatcttggctcactgcaagctccgcctcctgggttcacaccattctcctgcctcagcctcctgagtagctgggactacaggcgcccgccaccacgcctggctaatgtttttgtatttttagtagagatggggttttaccgtgttagccaggatggtctcgatctcctgaccttgtgatcctcctgcctcagcctcccaaagtgctgggattacaggcatgagccaccgcacccggccaatactttcttttgaaatttatgttagccttgaaaaataatggtaagccgggtataaatatgctgatctaaaagtgttattagttgacatagttaaagttgataaaacagtcaaaatttaccatgctgtcttctttctagcatatctatattttgacaatgaaaatggttctttactaattatatatttgcttattcctgccaataataagacattctttgtaaaagcactttaaaacttcatagaaatatgaccgggtgcagtggctcatccctgtaaccctagcactttgggaggccaagacaggtggatcacttgcggtcaggagtttgaaactagcctggccaacatggtgaaaccctgtctctactaaaaatacaaaaaaattagctggccatggtggtggtgggtgcctgtaatctcagctgcttgggaggctgaggcaggagaattgcttgaacctgggaggcggaggttgcaatgagctgagatcgcgccactgcgctacagcctgggcaacagagcaagactccatctcaaaaaaaaaaaagaagtgtgtgtgtatgtttgtgtgtgtgtgtataatagaaatatgcaaacataacgttctatgttaagtgtataaatatactacttgacagaaataatactgtttctgttgagcagatgcagaatcaagttcagagaagttgaattgcttgttcaaagtcatgtaatagtaggagctgagcctcaactttataaatggtttgacactactttacttgatctttctataacatcatttcatctcttcctttaaaaattcagaatcgttatgattgtttcctttgtcacctttattttcttagtcatcaagaagactcttgttgttttcagctcagcacttcaggagagcctatagtttttatctttcactttagaaaaatagatttttgttctaggaccctgtcccaagattttaggaatttgatagcatcaacatgagtttagatatagcagtttacccacagtgtatctaggataaaataaatttaagataaatatatttgcaagaacactggatagaacttagatatattaattaacaatttgccacactcagaggaactgccttttttctttctttttctttttttagagacagggtctagctctcttgctcaggctagtgtgcagtcttgcagtcatagctcactgcagcctcaaattactgggctcaagcaatcctccaacctctgcctcccaagtagctggaacaacaggcacctgcctttatgcctggctaattttttaattttttgtagagacagggtctgactttgtggcccaggctggtctggaactcttggcctcaagcaatcctcccttcttggttcccccaaaatgttgggattacaggcatgagccactgtgcctggctacagaatttcctaagttattatttgttcgtttgttcattcattcattcatttattcaagacagggcctcattctgttgttcaggctgagtgcagtggcatgatcatggcttactgcagcctcgacttcctgggctcaagtgattctcccacctcaacctcccgagtagctggggccacaggtgtgcgccaccacacctggctaatttttttatttttatagaggcagagtctcgctatgttgcccaggctggtctcaaacttctgggctcaagcaattctcctacctctgcttcccaaactgttgggattacagacacaagcgaccatgcccagttggaatttccttttttcgatacagttttgatgaagaaattttctgagggctatacttgctaaagcttgaaacagaagaacaaaattggtcactaagaaagtaggagaggttttcattcatatccactgtgtatctgtgtctcagacaaagatatgctggctatcagaatgctgacattgcttactttcctatttttcaaagactgaacaccatacacatagcttgaggaaggatattattcttgtatacattttgacataaagatgtttagtccttggctggatatttcagttctctgaaaatgtgtagctatcctgtgagaagcaaacatcttggaaacagtatagtatagttgaaggaaacggtcctaccgtttccttgcttagacaaatcatttcatctcttcttttctcagtatttttttttctggaaatctactctttttctagaaatatgtatacaacatttaaatttgcatgtgtctgtcaacatcagtgtgtaaacatattatgttcactatgaaaacatttaggaaattcagataggcaaaaaggaaaagagatcgctgactacagcagaaaactataacattctgataaagttagataaaagccttttgggcttttatagtacatgtatatgcacacatacacatagactcacacacatacatgtacctacaaataacatcttaaaatgagttcatattgttaaaaagtgagtttatatagctaaggaagcacatctgaggacaagaacacctctattgcaaaactaacagatgatatagaactagtatggaatacaatagaggtgactaaaaatttaatggtttggagtgaaagcgtggaataatcacggtaaacacaggagtaagacacaaagatgaaagcaatttggttaacaatgatctgatatgaagttgaaaggattactggtgtctttgaggaagtggacccaacaaatcaaactaaaaaagtatttggagaagtgatatagcaaaacttcactgaaatgaggaactgaacctgcagatcaaaagatacattgaatcctgaaaattggtagagaaggttcaacatcatgtcatatcctgattgttgccaaacaagagaaaggtttcttcagtcatgtaagcaaaagcaaaagttatctataaggaagaaaagcaaaagttatctacaaggaagaagtttagactggcctcagacttcacaacaatgtgcaatactacaggagctatgtcaacacagttctgataaaagaaattacggcccaagaacagtgtacccagccaagttgttgttgaggtataaaggccacaggcgtatcctctcaaatgtgaaagaacccagagaatatagtatctgtgagacctttctgaaaaagaactaattgttgaaatttagccaaccaagagaggaatcaaaccaaaaaagtgttgtgatattaaataccttcatatatatatgtaagatttagatactgtagaaagtgtggcagtacaacagactgtaaacactctacatcatggcaaagtaaaacaaatatatacaataaaaattggaaggtaggtagaagggaaatgggaatgagagattattaatcttattcatagcaacaattcaatcagaactgtctcaaatgtaaagtagtttaaaagtaatgttaatctattctttgtggttttgatcatttttcttaaagttagagggactttttcacaattaatgtttcttgagtgaagaaacatttgtctaagatttaaaatttcttcagtttcatttcggcttctgttaattgcaggtaaaattagaattgatattttttatttttaactgtgaatataatctcatcccagaaagaatacatttatttctgtccatccattatctatgtgtatatgtgtatccatgtgtatagaattgatattttttatttttaactgtgactataatctcatcccagaaagaatacatttatttctgtgcattcattatctatgtgtatattccagttgtctggaataatgtcactaattgctaatctaatacctaatatttctcaatggtgagattttggatgatttaatgcatcttttctgtgtattttttgtagtatttgaatttatataatgagaatattttaaagaaagtgatacaatgaatttattgctctgaaaaatgaataaatacttacgcagttttatagcctcatttcttttttaacttatcttgaccccttttctcttaccatcattttaaatagttgcacagtattttatggatgtgttaatatatttcttctttcattcctgatctcagtttcttcatctgtaatgacagagctgaactagattagccggttgcaatctttctctttaaactatgaaatccttccaagaaataaacagtttataactcttggcttaggcatttcccatagaatgtagtttcaaagctgtacagattagataatttctgaggcttatttcattttaccaccaaaaattagggtttttcttttttttaggatttttttgagtgactttttcatgtgtttaaaaaaaatcggtaacagacataatcttatgaatcagaattttaaagtgaaagggactttgaaaaccatctagtatatttgcctaacttttatacatagggaaaccaaatttaagtttttaaactaacgtcatacagccaactgaaatgaatgagacttgagtgcacatctcctgactttctatgctgttcttttccctacagtacacataaatatatatacatatatatttatacaatgatgggcaaacaagatgacaattttattgtactcatgtcacatttaaaccatcatgtaaatgtcaggaaatatgcttaatttatagtgtatttattttcttgttcatgaaaagagatcagtactgcagccattattgaactcctagagttagaaaggaaagtgagtgggattctggcgagaaagaaagcatttacttgtcaaagatttggaatttactgtggttaccaaaattaaaataaaactaaaacttgacttggcagaagattaaaaacaaagcagctccaaagtgtgtgcacatcatggagaagatgccattattccttcaggcagccaaaggggaagggaatattgtttctttgcgttgctggagctgatttatttagttatgatttcaacatgcctacagggcacaccccagaaaacattacacaacaacattaaccagaacaaatggtgctttctttttctgtatctcctcctaaggttttttaacagcagtgaggttttttctttttctttttttttcccccatattgttaaaatggctctgattatgtttgactattgggtgtggcaggttttagaatgttaagtggtagtacaggttcctgaacaagaaagagaattagagttgatgtgacttgattattggaatgtgtagaatgtaaagttgtgagacatacgacggtctaccgcaggttgctcttagtaatggaccttcttgttaaaagccctgttattattgggaatttattttggaaactactaaagaagaaatttgacagaaaagtaaaacaaaccaccttgtctcatatttcctttctacacaggcactttgaagagatatcttaaatattgtcaagtctcaattatcctggcacacgttagcattatcaccattctcacaaacttgaattaaatgcacatggtattgcagcaggtgcagcacagagaaaattggcaaacaagatccttatccttttggagctcagtaagggttgctatcctagtaagtagttcaaccaatcccaaactaatttttccggatactctccaaacaccctccctcccttcctatatcctctgtcttcattagtggcctctccatcctctcagctggaaacctcacattcatcttgagtctttatgttcccttggtcttcacaaccaatctgtcaacaagtcctgtttcttctatcactaaaattgctttttgactttgtttgtactcttccctccattctcctagccattgccctgtttaggcccttttcatcttccatttcagttcttggagagctgcttatctacttttaacctttccattttctaatccatcctccatactcttgtcaaatctctttctttaaagacagttctaatcatatcactctctggtttaaaaacctttgatgggtccccattaacacataagggataaagtctaaactccttagcttgtcatgccagggtttcagagtctggctctgatctacttattctcatctcattacctgccataatttcccccttaccgtatttcccattgccagacgcacacacacatgtacatttactccattcccacaagcttcctcataattccctgagcttgctatgtaattgtgcttttgatcatgcctttccttgccccatatacacagaacactcttccctgacaaactcttgcttgtatagaggaactgaggaagccaagattttacaaagagtactcttgacaaaagaaataaaccacgtgcatagaccaagcagtagggccaccgttagagcagagttcagactagtggctgccgactagtttctcttgggcaaaccaggaagaaggactcaatcccagaaggtactggcattatagcagtgattaaattggtttgcaatagtattaaatgaatgcctccttcctatttatacagccaagagttagcatttacttttatagctaaaggatagagggaaatagctacagtaggtttctggcatagtagttaatttcaagaattaaaagaaaactcattacccttatctacctactactcctaccttatctcatgttccaaaggtgtaaagaatgattaggaactcacaggaccacgagccttcacactcacattggtgctttttaaaaatcaccaggatagagccagagatgatgggtttaaggggtaaattgaaagagggaaatagcagctctttacctcaagttactgaggaagcagaggcctttttcatgctctgcctagtcatgcttctccctaaccattgcatctttctgctcaacctttgtcctttttatccacatatgattcttttaaaaaattagttcttactatataagtattgtattaacatagtatcttcaaaacatgtggaatgtttgtaaaggcttctctgacattctctcaccaccatcatccccaatcccagctgcctacccaccaatgccagaaaatgacaactattttcagtttggttttctgttgcttcagacctttctctatgcattgacttagagatacatgttgtggatagacaaataggcttatgaaatatagtattgctgtgtgtgtttgtatgtgtacgtgtgtgcttgctttcctcacagaatcagtatcatacttactctgcctctcagtttgcaaacttgcttttttgactctgcccgtagatcttggatatctttcctattagtatgtagagataatttatcacagttttttcaacttcttacatacagtattatatttaggtctagcttaaccctttcctcttctcatagcaatctgatatggacaattagaagagaaaaaaattttagtaactgtgttagtttgttttcatgcagctgataaagacatacccgagactgggaagaaaaagaggtttaattggacttacagttccacttggctggggaggcctcagaatcatggtgggaggcgaaaggcacttcttccatggcgccagcaagaggaaaaatgaggaggttgcaaaagtggaaacccctgataaaaccatcagatcttgtgagacttattcactaccacgaaaacagtgtggggaatactgcccccatgattcaaactatcttccaccaggtccctcccacaacacaggggaattatgggagtacagttcaagatgagatttgggtggggacagagagccaaacctcattcagcctctggccccctcaaatctcatgtcctcacatttcaaaaccaatcatgccttccttatagtcccacaaagtcttaactcatttcagcattaactcaaaagtccacagtccaaagtgtcatccgagacaaggcaagtccctttcgtctgtgagactgcaaaatcaaaagcaagctagttgtttcctagacacaataagggtacaggcattgggtaaatacagccatttcagatgggagaaattggctaaaacaaaggggctacagggcccatgcaagtacaaaatccagtggggcaaattctaaagctccaaaaagatctcctttgactcagtgtctcacatccaagtcatgctgatgtaagaggtaggttcccacagtcttgggcagctctgcacctgtggctttgcagggtatagctcccctcctggctgctttcacaggctggtgttgagtgtctgtggcttttcaaggtggaaggtgcaagctgtcggtggatctaccattctagggtctggaggatggtggccctcttctcatagctccactaggcagtgtcccagaagggactctgtgtgggggctccaaacccatatttcccttccacactgccctagcagagattctccgtgagggccctgctcctgcagcaaacttttgcctgggcatccaggtgtttccatacttcttctgaaatctaggtggaggttcccaaacctcaattcttgacttctgtgcacctgcaggctcaacaccacatcgaagctaccaaggtttggagcttgtactctctgaaactatgcgctgagctgtaccttgaccccttttagcaatggctggagtggctgggatgcagggcaccaagtccctaggctgcacttagcatggggccctgggcccagcccatgaaaccattttttcctcctaggcttctgggtctgtgatgagaggggctgccatgaagacctatgacatgctctggagagattttccccattgtcttggggattagcattcagctccttcttgtgcaaatttctgcagccagcttgaacttctcctcaaaaaatgggtttttcttttctactgcatcatcaggctgcaagttttctaagttttatgctctgtttccttttaaaaatggaatgcttttaacagcacccaagtcaccttttgaatgctttgctgcttagaaatttcttctaccagataccctcaatcatctctctcaagttcaaagttccacaaatctcaagggcagggacaaaatgctgccattctctttgctaaaacataacaagagttacctttgcttcagttccaacaggtccctcatctccatttgagaccacctcagcctggactttattgtccatatcactatcagcatttttgtcaaagccattcaacaagtctctaggaggttccaaaccatcccacattttcttttcttcttctgagcccttcaaactgttccaacctctgcctgatactgacttccaaagttgcttccacattttcaggtatctttaaagcaacgccctactccaatggtaccaatttactgtattagtctgttttcatgcagctgataaagacatacctgagactgggaagaaaaagaggtttaattggacttacagttccacttgactggggaggcctgagaatcatggtgggaggtgaaaggcacttcttacaaggtggtggcaagagaaaaaaatgagaggatgcaaaagtggaagcccctgataaaaccatcagatctcatgagacttattcactatcacgagaacagtatgggggaaactgcccccatgattcaaaccatctcccactgggtctctcccacaacgtgtaggaattatgggagtacaattcaagatgagatttgggtggggacacagaaccaaaccatatcagtaagcaagtactggttctgattaaatgcaaaaaatgttgcaattgttggtttcaggaggagtgttatccttaaaaattagactgtcttagaaacacttgttggacccagttcaaaggacttcactagcattaacactctctctcctttctttctccttaacccacttctacccaattactgacattgatgggagttaaatgtaaccaggactctttgtttatatatacatctggttttccctgttccgtatgcctaaatcctccctccattgcttctgtttagcatttaatgtaaatttccaaattaattcaagaagaaaatttgaaatatataagatgagggcattaggtgatctctgagggcttttacagctctaggattctattaggttattaataatttatttccagaggatacattctgataaactaagaagttttctgtgcttgatttagcttttacttaattaggaatataaataactaaatatttaaatagataaaacttatgctatttgtcactttttcttgaagcatatttataatgatcatttaatgttcaaagtaaacctccaaaaggacttggtaactgccaaatattaccaccaaactgtagactaatcaattagaccactagtatttgaatttttttcttttactatataaaactaagaaacgtggactgaatcaaagtgaatgggagctttggataaaatattggtaagatgtttgcacttactgtctgcttttgaatgttcagatatttaagaggtaccatcatataccacgaacaaaaggttgggagtcaggaatcagggaattagtcctagctcatcactgtctcattttgtgattgcaggtcatgctttgctcttaaattttcccatctttagcatgtagtagattatttctgacccttaacttacccagggatgttttgtgaaataataaagataaccactgccagttattttttgctgctcagtaaagattctacacaaattaatggtagcagtagggtggttatttcattatttaagaaagttcttcaaagtgagagaactacccagcataggtcatttggaattgctgtttatttgttcttttaggccagcaaaagtgttctatgttaggtagaacagtgctaaaaacttacataaaagcaaaggttttgtaagttgtaggagccagtccttggtggatctagttctttccaactcttgtttttagtcatctgcttttataaaagtgagtggtcttaccttttagttgttttttttttcctaaggtagatttttatttttatgtttattcatatattctgtatgagttctgtcatcttgataaaccttggaatagaaagtcatatgtaaaatttgccactttacttgaattctaacactttttgtgatgttaacctgttagattctcattctaaattccacttctcaccttcttgtgattggttgctgtttgttaggaaaacatgtaacagattcttaccctctttgaaaaatcactgttgttctttttgttgatgcagaacagcagtaattttttctctttaaaggaaaaataatttagacaaaggagatacttgagaaaagagtttaaagaaatttactgttttctcagtgtacttcttttcaaaatgatgtcaccccaagtgttataattctttcaaagcttagtgtccaactggtgaacaaaactaacagttgattgcctcaagttcagcagtgtttgctgtatattttctacatctgtggactattctgttatgacataaaagctattaaagattataatttttaaactatatatttcactaagtatttataaacacgtatgaaactcgttctaagtataacctgtactgaaatgaactgttcatgtttatgactcagtaggtaaattgctctggagtgcttcagaccaggctcagctgaagcaaagcattttgaattgatattgttaggaaaggttttttttccttattcaacggttacatgcgaattttaaaagatttcttgtgtttggttagttctaaatttaaatttgttatacttcttatactagtagaatgtttcctttctatctgcagatttgagagttggtcttggaatatggctttgcagattaaaaaaaggttacttttaaaattcctcttaaactttataattcaaatcagtcaagtaaccaagaagagaaattagagaggataccattgacttgctttgtatctgttgttcttcctttccttctctgcaaaggtaaactgaattgcagctttgtacttagaagtaaattactattaaaataaagacagtttaatagtattttagaaaatgtggaaaatggaaagatgggaatgaactataaaagatagaatttgagctgagtcttgaagaatacattgttcttgatgtattccagacttccccttagacgttttttattctttgtgactgttgtgtgttatgtgactacttaggtcatcctccctcagggggaatagttggacgtttattctccaactactatgtaagcaccatcttaatatttgcccttggatgagtcacatcactctgctttgccttaatttctccatctgtaaaatgataatggctatataattttagatttattgagttcagtggaggcaaacctttaaagtatagagatggctttcactgtgaatgaatttaagataaaagatagcattaccacaacagtgcatttttctacctttaacacatatgttaaccacatttttgtgggggcacaaaaataaggatttggcatacaagataatttgagtgccttgtacgtgttctagctggcaataatcctaacccttgtactcagcatctggtttattcatgagatcccctgtaattaaccagtagtacttctcagtcttgtcttttaggaagatttatggtatacctcaggtggtgtcagatagcaggcagaagacagatgagtagctagttctctttatttagaaaaaaattctgtctccttgacaccaatattgttaaataagatatgatttctaaaaagccattttccctgtttatttgacatgattggcagctctactatctgaacacctaagaagtttaagtttcttaggtgtggttttagagtcttaggaaagctgggaagggcctagactttagaggcgacaggcttatggtgtgtcctggagtgttacacaaggaagaattattagggccaggtgcctttcatgtctatgtctgccaaagtaaaaaatgcagaggcaagagtttgtctcagcaatagtttcatacattatctacacagagaaaagtgactatttaatactggcaagaattcaaatactttctatgtaatcaatatcaaaagagggtaagtttgttttttgattggttatcaagttgatatacagtcctattgctgtggtctgcttaacctgtaattatcagagaaatcttgtcaaacaagattttctgaaatgaagcctgttaattatatcagatcctttggttttatgtggaactattatcatgtcatgaattgggaaccgtttgaacaaaatactgatttggaaaactctttatctcaaattttgcttgaaacccatgacatctaatggaaagggcatggtgagaggcaacactaaatttctaagctgaactcttttcctaaacatccctcagtgatcattctcttgtatgagtagatcccaacaagggtagggattggttagtttcagggcatcttatctaaacattcgtctaggggcaggtctatgctggttagacacatagaaatcaaaattatcaacacagtgatgacaatgtaattggccatatctatcagcaacttataatcaaccatatctaaggctgctgaaaggtacaccctggtaaaaattctggctctacctttgactttcattactgaccctaaggattttggactgaagtctgtaagtgagcttgaattcaacctggaatctgctttgaccttgtaggtaaatagtgtgcaaagttaggaaattagaacaaaataaaatttactttacagctaggataaattgtgataaaatgagaaattggcagcaagaagttttagtgaataggaccctcaaaggaaacttaaacaatgttgaagtgatgtttgctgccatcagacagcacacacacacaaaaaactatgtctaaactgttaaagtggattttatgtaaattgttcatgataaacatttgcattatatattcctattcctttgtacttcccatttgatgaagttttcaaactgtggtttgctggaggggaaaaagaaaacccaaatccaaaccacataggacaaattgaattacaaacctggtgtggtcccttaactcaattacatctaatttgtgttattttagtcatcctgggtggcagctgttctgagtaaatgcccacaaacattttcaatgtaagaatttgtcctgattacagctctttaagatcagtagtagcctatttatattttaagtggcaaagttttagattaatttggtgtatcaggaccattttaaaaattcaaaatttagttgtttcacaaatagacatttaaaaagcaagcatccaatgtttattttaaatgttaatttttgtaacttcacctcattttcttatttcttatgtttctacttatgtttcttctaaacatagccacttaattactttattcaggcatttatcaacttgcatatacaagggaatatggaattttagattcagataaatgctttgacattccaagtcaaaatttgagatgatctgggaagaaaaacatgaaataatatgggttcaggattgttcagttcaatataattaaaacggaggtttgtgttagaactaagttaagattgaatattaaatacaaaagaaatgaagaccttgaaactcatgaaagtcttgtggaaggaccttgactagtgttctaaggtagacaaatgggaccaggctaaattttagggaattacaatgaagagatactatccagcagagacagtaatgaaagaaaactcctattacttcaaaaatgatagatggtacatgaatatgtttaaaagccattgtttttctactaaattcagtaactttcagttagcaactgaatatcttttatggactagatattgatctatgtactgagacttcaaagatgaataaactaaaggttcctactttggaggaacttatactgtagttaggatggggaacatgtaaataatttatagcaacatatggtaggtgatatgataaaggtttgaataaattcaaagctttttcttttgtcataaggagggtataggcctaaagttagggtattagatcaaaacaagtgaaatttttgtttaaacttactacagtacatgagacttatacttcactagatatttaatcagttaatggtcgacccatagacttaggaatataaattgtttaaatttgaggtgtttatcagttgtgtacactttttccctactcattctctttttatggaaaaaacaatttggtaatcaattatgatatgtattttcttgtatatctcttataatttttaattagttgtgaactgtatcaactttaataacattttaaaagatgttcatcatcctatattcctcttttatatgtgatactgactactaatctactatttatttttgaaattatttttggtcttcagtggtagtgtgctttttttggtttctctcccacttttggagagttgatatctgctttgctggcttcacatctgtattagttatcaattgccataacaaattaccctaaaacttagccgctttaaacaatgaacatttattacctaatggtttctgtgggctagtaatatcgtatctgtcttattcacatgtgaatgatgaacattcagacatccgataaatattattgaatggtgcacaaatgaatgctgttattcaagttgaggttcttatcacttagcacctaatgggctccaccatcttctttgctggcttccaatccttacccccatgctgtttgtaaaaccaccctttcaaaagaaatttatgctgctgcttcccttattaataaccagttgtgactctcattggcctaatcaaatttctgttggtctccttggcattcaaagccttccataaaccagccttatcatatttattcaaccataaaccttaacagatatacctattttacttaaactggttgtttatactttagacctgttaaaagacaatccttaaccaaattaaatataactcagtttaattgagcaaatctggcggcttcttgaacccgagtagtctgagagagactccattgcagccacgtgctggaagatttatggacagaaaaaggaaagtgacgtacagaaaacaaaatagaggtacagaaacagctggattggttacagctccgcatttgccttatttgaacgtagtttgaacagttggccccctttggccaaaactcagtgattgtcacaagagcagattacagtctgtttacacatccttttagattatagttcacactgtgtagagaaacctttaggctgaatttaaaatatgtaaggaggcagctttagggtaaacttgatttaacagaccaaaccttatccccatccctaatatcatgttcagttttactttcttacctttattaatgctttattccctcatctgtaatgcttatattccttgctttttcaaatgttgttgattcttgttctccactcaaattctttatgtttcttgcacctctttcataaacccagtttggacttttctggcccactccagttgtttttgttttcgcttgatttttttttttttggttgttgttgtttgtgttttgagacaaggtctcactctgctgtccaggctggagtgcagtggcgtgattatggctcactgcagcctggacctcctgggctcaagcaatcttcgtgcctcagcctcctgagtagctgggaccacagatgcatgctaccttgccaagataatttttaaaaattttcgtagtgatggggtctccctatgttgcccaggctggtcttgagctcctgggctcaagcgatcctctcatgttggcctcccagcatgctggaattacaggtgtgagccactccacttggctcaactctagttttttgttttttgttttttaattttattttatatatttttattattattatactttaagttttaggatacatgtgcacaacgtgcaggtttgttacatatgtatacatgtgccatgttggtgtgctgcacccattaactcgtcggattaaagacttacatattagacctaaaaccataaaaaccctagaagaaaacctaggcaatacaattcaggacataggcatgggcaaggacttcatgtctaaaacaccaaaagcaatggcaacaaaagccaaaattgacaaatgggatctaattaaactaaagagcttctgcacagcaaaagaaactaccatcagagtgaacaggcatcgtacagaatgggagaaaatttttgcaacctactcatctgacagagggctaatatccagaatctacaatgaactcaaacaaatttacaagaaaaaaacaaacaacctcatcaacaagtgggcgaaggatatgaacagacacttctcaaaagaagacatttatggagccaaaaaacacatgaaaaaatgctcatcatcactggccatcagagaaatgcaaatcaaaaccacaatgagataccatctcacaccagttagaatggcaatcattaaaaagtcaggaatcaactctagtttttaatctttgaattctcgttgcattaacactcagtaccaaacagtgcctttctttatttttaattagtttaagtgggtgaatatgtctttccaactagaattccaattttctgacagcaaaatccttttacttctcgcatctttattgtagtgtgctgtgagtgtatcctggttgattgaaaaactagaaatgttgattcacctgtatgtaaaaaatcctttttgagtgaattttaactgctagagacattcatgaggatgagctgggactgcaggacagtttggaactacattttattattttcctgaagaaacattgctgtatgaagagattaactttaaaaagttccctccggccaactatcagaattggcttttagccttgaactatcaaagcaaaactttcagtgttgcctagagcagaacaggtattaagtagcaagcaattcaaggtctctgatccctagcctgcttcagctatgggcctggccaagccctttggcaaagataagttgaataaggaatttacttttatcttctccctcttggaagttttatggatttgattcacaaagaaagggcaataattgaaattttgtgttagcttcttcttgttattcaccaagaaaagttaaagtcaggtaatgatatcaatcaaaatgtaagtacacctactgcctaaaaataacattgtggttaattgtgttccataatattcttggcatactttgcacaagccctggagaacaaagcctgagagcccatgggaaataaagctccagttctttcggccactttaaatttagttctgtgatcttgataagatatcattgtatttacattgttagtttctaccagcattcccttgtatcttcttttatggctttttctatttctgtgcctttttgttcctcttccttattttccccctaaagccataggtagaatgtttggttttagagttttataagaggagtatttgacttttccttatagcgatctcagatttcattaagtttgtgttttaggatgatttataatatcagtctatgatttgggctattatttgcacatttttggctttcctgtggctaaactactggtgtttatataaaaaagatttttttttatttatttatgcatgtaggggtttcagccaagattcctgtctttagtactggaatatttgaattagagaaattaagaaagtgaaaaaggctaaagttcttgattcttaccttttatccttatagttaatgacttataaatatatttctttgggaaaataaagaatatcaattgactgtcacctcagttaatccctccagcctctgcgttttttcctctaggtgacctgtaagggcctgctcaataaagccagtgtgatgatgttagctttgttgcatcttttagttttcttctttactcatcccacacttcccatacatatcccgcttcccttccctggtgtgtttaaaggtaaaagaagtaaagaagtgggagaagagacagtgtgaaggaggtgcagaggcagacatgaaaaagtgtcaggaagaagtctgagtgtagcccttaaaagactattgctttctctagccactaccctattctgctttgttcctgttgcccctactttaatatttctaaaaggagtttaaaataaaaatgaaatccatttgaatttcagtcttgaacactcaaataaaagtgcttttctgaaaatctacaatgatgtttttaaaacaccttccttgatcactctgctgcattttatgcaaagatgagcatttccttctgaaaaaaggaaaagacttattgactaacttttgccacatgaaactgtataatcaacctcatttgaaagtgcacatttcatttgatggcatttgcaaattgttccttccccccaccaccagaacttgcaatgtgaaaatgcttccatatgctaaaagctagtctactaattttactgaaggagaagaaaagaaagtatggctagccattttctaaacatgaagctacagtgtgggcagatttggcaatgggagcccctcagagttcactgtaaacaactctgcaacccccaggcctcactactgttcaagatgagtgtagaaagttgtttttgccccacaaaagtaaatttttaaaaatgcaattgtaatgtgtatatagttttaaaatatctaaatgcagttaaaatatagtattaaactctgatttctaatagatttgaacattttaagtgaagaaatacttttgctttcagattctttgtgtatctcaagacattttaatagttttcaagacatttaaactgagtcttcactctgggtggtgggcccccaacccctaatgcgtggcttatagcaatagttttctccctgattttcctaatattagtcattctcccttttaacactgcgctacttggtgctactaggataatctttcataaataacattatgccttttcctgttgactgatctcatttaccctaatctcaccaatatttctcccaaatctgatttataattttctttaaggagtcttcgtagtaatcccatctggccccatttttcaacagtacttttgaaccaagcttctactattattattttcatgttgatttattaaagttttttaaaaaattgtattatgtctgttctttttttcccaagtagatatcagtgtgatggaaacactatcttctatatcttttgactggagtcttttatacttctgagtacatgatagatgttaaatatatactctgttaatacatattagcaagtttaaaatggtggctgtttgtttaagtcacataaattatcaaacaaaagagctgagtgatggtacctgcacaatgcttaatatatagtagagatgataaaataaattctactgaagtctgtacttcatctttttaaaaggtttattgcttagcttttagaattaatggttttatctttgaaatagagaaacaggtctagggttcatgcagttataaataaaaattccttaattttatttctattactgtagcatcttatgccaaaaaaaaaatatcgtaaagaggaagaagtggccaggcatggtggctcatgcctgtgataacagcactttgggaggccgaggcaggtggatcacctgagatcagaagtttgagatcagccttacccacatggcaaatccctgtctctactaaaagtacaaaaattagctgggcgtgctggcgggcgcctgtaatcccagttatgggaaggctgaggcaggagaatctcttggacccaggaggcagaagttgcagtgagccaagatcgcgccattgccctccagctgggcaacaagaacgaaactccgtcttaaaaaacaaaaaaaagtggaaaaaattagaggactaacattacctgattttaagacttataaagctagagcaatcaaggcagggtattggcataaagatagagaaacagatcagtgggaaagaatggagagtccagaaacagattcttatgtacatgggcaactaagttttcacaaaggtataaaggcaattcacgggtgaagggccaaactttttaacagatggtgctaaaacaattggatattcatgtgaaaaaattatttatatcacataccatataaaaactaactcaaaacagatcatagactaaaatgtaaaaactaaaactataaaactccttaaagaatacatagggagaaagtctttgttatcttgagataggaaaagatttcttctatatgcctccgaaagcacaacccataaaagaacaaattgataagttgaacatcatcaaaatttaaaatttctgctcttgaaaagagaatgagaaggcaagccacagatttgtggagatgatatttgcaaaacatattatgataaaggacttatattcaaaatatataaggaactctcaaaattcaataaaaaatcaaacaacccaacaacaacaaaaggtagacatcggatagagtatggtggattacatctgtaatcccagcactttgggaagccgaggtgagaggattgcctgagcccagaagttcgagaccataagcacatgaaaagcccaatgtcattaattgttagggaaatgaaaagtgtactgcaataccacatcaaatattacttccttttctataaatatgtacaattattatgtgtcaactaaaaataaaagaaaaaaataaaattaagaagactaaccatatgaaatgttggtgaatatgtggaggagctaagtcttataccctgcgggtgggaatgtaaaatggtataaccactttaaaaaatagtttggcagtttcttaaaatgttaaccatatacccaccgtactcttcagccatgtcagttagctttttacccaaaataattgaaagcatatgtccatgcaagggcttgtacataaatgtcatagcagccttatttataatagccaaaaatgaagtcacccgcatgtccatcaacaagtgaatggataaacaaactatagtatatccatataatggaatactatttacaataaaaatgaattaattattggtacatgtaacaacatggatggcacttaaaataatcatgctgagagaaataagtcagtcaaaaaagactgcgtgctgtttgatttcacttgtataatattctaaaaaatgaaaaataattcatactgatagcagatgggtggttacctagagatggggaatagaggaggagaaaggaattacaaagaggcacaaggaaacttcaggaggttaaagaagttttaactatcttaactgtgatgatagttttgcaggtatatacataattcaaaggttatccaattgtacactttatttatttatttatttttgagacagagtctcgcattgtcactcaggctataatgcagtggcgcagtctaggctcactgcagcctctgcctcccaggttcaagcaattctcctgcctcagcctcccaagtagctgggattacaggcacacaccaccatgcctggctgttttgtatttttagtagagacggggtttcaccatgttggccagactggtcttgaactcctgacctcaggtgattcacctgccttggcctcccaaagtgctgcgattacaggcataagccaccatgtctggccccaattgtacactttaaatatgtgcagctttttatagcttagcaaaattatacttcaatttaaaaaaagaaaaaattgtaaagaggtgttaaacatgcagttcaccattgaaagcaatattatttaacatatgcactagcatattataagtataataaatgtaaatataatttatgtatttataaacataaatataacaatgaacatatacattattgaagagtcccatatgtcaccttccatcttgggttttatagttactaaaatgttatcaaaggagaagaccatttcataaaggaaattattacaccttgaccatccaatacttcagtctttcattttgcgtggaagttctgtatcagctaccatagtcattttttaaaaataacagcaatcttcgttttttgaaaaactatcataggccatctcaatctttatctatcaatattttccttctttcactttcttgataaagccccatattttgcttctgcttctatgtttttttttaaaaccaaatgattactaaacagggagtgaaggtccaggtgtggtggcttatgcctttaatcccaggattaatctttgggaggctgaggcaggaagatcacttgagcccaggaatttgagaccagcccaggcaacatagtgagacacgaatatctacaaaaatttaaaaaattagccaggcatggtggcacgagcctgtagtctcagcactttggaggcacaggtgagaattgcttgagcccaggagtttgaggctgcagtgagctattaccacatcattgcactctagcctgggtgacggagggagaaagaccctgtctcttaatctgtagaaactgtctaatactattactactgtattagttaaatgactcatttacagcataatttgggaaaggaaattcttggattttatcccaagtgaggacttagaaccaagtgatatagtggttaaaataagagtctcagccaactagagggttagaattttcttggtatttaatgtattgtgcttaatttatcattatgtaagtaagctcaaatctcattggtctctttatataaaaaggaaaaaaaggaaaaagagcagaaaagataaagccccatattttgctgcttctgttttgctgctattgacataagaaggcctatgtagtcctatgtaggcctttttatgtcaatatcagtctgagtaaaagcaaataatgaatttatgctgaggtacaaatataccatttggacagttttatattaacatctgacaatgtacaaaagttatacaaatttgttagcattttctcactgcaaaatattatcaaattaggaaatagcagacactagggatggtttttactatatataatgatgtttaagaggtacttaaacttgatttaaaagctctgcagtgatttacctaagatgagcctgaagagctaatagtctagtttttgttttttaatttttatttgtagcaacaagcacattaaccatttgattttttttatattttgggagaaagttgtgaccatgtggcagtttggatttgaaataataatggcaaataagtggcctgtgctgaaaattgttaggcatatctctttatggaaaactactttggtgatataaaaccaccgaggtctatagttatataatttaggcaagcagaaaaatcagacagggctggttttttttttttctttctttcttttttttcttgacagtgtctccctctgttgccaggctggattgcagtggcgcgatcttggctcactgcaacctctgcctcccaggttcaagtgattctcctgcctcagcctcccgagtagctgggacaacaggggcgtgccaccacacccagctaatatttgtattgttagtagagacagggtttcaccatcttggccaggctggtctcgatctcttgacctcgtgatctgcctgcctctgcctcccaaagtgctgggattacaggtgtgagccaccatgcctggccagggctgggtttttattaaagatttagtttcgttcttagaagttatgtcaatttctgatgagtaatctagtaataacttaatctgtctttctgaattaattctgcaaaacactgccacatactgattgttgtaaacattgttggtttcaagacactttcttattttaaccctcctaacctttcaaagattcctcattacttatggtttaagtcattccttcttgttttttatattcaagacctttcacagttgatcactgagctgtcctttaatcctctgtgtcactgcttttcagtatgaattgctaaagtttctatgatttttctgtttctttgccttttgtcaatctttgttcagtctggactctctgcctttctctcatctctacctactcttctaagccctagaatgcttcaggtaccacataaaccacatcagcataaaaccttccatgacattctattcatacatgttgtaaatgcctcttttgtgccgagctgtcagtggtcaccaaggtaaggacaggagcaaaggatgctccgtggtactccactctgatggacgaggaaaaatgataaatttacaaatattttatctcatcctatatacattttactttttatttatgtcttataatgtaagcaataaattggtacccaaatagaaagtgtaaaataattaaaatacatatgttgagggagtgcatgcccaaaatgttttactgatggggtatagaacaaaaagttaagaaaccaccgatctaattgtcaggtctgtttccgcatttgtaaagttaggtcaaggattggactagataatttccaaggtcttttttaagcttaaatgttcatggagttaaaaaaattattttgaaatctttaagtatacagaagagttgccagtgtagtacagtcagctcccataagccattcatgtggttttatccactgttaacattttgccatatctcctccttgtcttctaatacatatatatacatattactatacttttgttctggaccatttgctagtaaattgcagaggttgcaaccctttaagctatgtagtttagtatgtgtcccttaagaacaaagacattccattataagatgttatgtaagagactcagcacaaaagaggcatatgtaacatgtaggaagagaataacagtaattgatcaagttcaatataccataatctaacatagagtccacattcaaattttgcctattgtccctttatgacctttatagcagttttttcactaatctaaggattgagggaataggaattttcttgccatgtctatttagtttcctttaatacagcagctttttagcttttccttgacttttgtgacacggacagctttgaaaagtaaaggcccaaccagaaacagtggctcatgcttgtagtcctagcactttgggaaaccaaggcggggtagatcgcttgcgttccagaccagcctgtgcaacatgatgaaaccacatctctacaaaaaaaaaaaaaattcaaaaattagcttggtgtggtggtgcgtccctgtagtcccagctacttgggaggctgaggcggcaggatggctggagctcaggaggcggaggttgtggtgagctgaggtcgtgccactgcactccagcctgggcagtagagccagaacttgtcttaaataaataaataataagaaagaaataaagaaaagtaaaggcccttaattttgtataatggctcatttgggtttgcataagtgtttccactgtaccttgatttgtgtgtgtgtgtgtgtgtgtagtttaattctgtgtgtgtatgtgcatttgggtgcacacaatgtgcacgtacgtgctatggtgctgtgtgcgcaagttgagtcctcttttccaaaatagattgtaaattccttatagacagagatgatttatcttggtaatttttattccccacacttctatgcacgtatgatacttagcctatgattcaaattaaaaatattcataagtcaaaagttcttacatatcccatgggttaaggagatgatttaaaacatacagggaagaacatatcagattaattaactctcagtgattaaggatgccagagaataccatggtaacaatagaagcattatgttttattttattgaatcttgaaggaaattggatactccaaagtataatataatatggaacatgcactgtgaatactgtactagttgacatgtgtaatttcttttcatcatttctctgtggaaaccctttgcaataacgtttgaccttttttccatatacagagtcccaaaatagtattttcatctgacatgtgtattttaatgggtagttagcacgaaagatctttgtcttttaaaaatatgtttctcaagattgggaatatcttcagttgtcagtaaaagatctcttattatccttttattatcaaataagcatagttgtaagacagtgactcatccaaagatttgttgtggctgcttctatctatggtttttttgtgagatggagtttcgctctgttgctcaggctggagttcagtggcgtgatctcgactcactacaacctctgcttcccaggttcaagtgattctcatgactcggcctcctgagtagctgtgactacaggcacacaccaccatgcccagctaatttttgtatttttagtagagatgggattttaccatgttggccaggctggtctcaaactcctgacctcgggtgatccacccaccttggcctcccagtgtgctgggtttacaggtgtgagccaccacgcctggcccccttcagtctattttttatttttgtgggtacatagtcagtgtatatatttatggggtacatggtatgttttgatacaggcatacagtgtgtaataatcacgtcatggagaatggggtatctatcccctcaagcatttatcctttgtattacaaacaatacaattacaatcttagttattttgaaatgtacaattaagttattattgagtatcgttaccctattttgctatcaagtagtaggtcttattcatttctaattattattatttttgtacccattaaccatttccacctcccgctaagtccccactacccttcccagcctctggtaaccaccattctactctctatgtccatgagttcaattgttttgattttaatggttagtacaagtaagaagtttttcattttaaagtcagcatctgaaaagatacattgtagcctttagaggctctgatttccttgaagcctgttacttatttgtaaaggtccatagtaagattgaacttactatttggaattttaaattggtagcttcaagaactcttagaagatctttttttttcctattttaatgaagaacatttaatatacaggttttcttagtattgactttcataagtattttctggggcaattactatctcagttgattatctctgaaggcctattttaactctacatttatctgaacttaactgaataactcctcattactcagcacatattttagtgaagagattcttaggagtaacggctgacattcaccatattgtggtttgtctgtgtgtatgttcctgtggataacttggcaatcgcttcctcagcgaaataacagccagtgtggttcagccaaagtttagaggaataaagtaactgaagtgggaggtttttctgtaatgccgagtgattttattcttggttctttctttttgaattgctcaggtagtgtttgccgtggtaggtattaaaaccaaaccaagcaaacaaacaaacagtaaaaacccaataacaaccaacaaacaggaaataccaggtaattcagattatctagttatgtgccatagtatgaacccaagaactcttcctgtaactccaaaataaatgtatgcttaggtcagaatctgagttagaaatgaaaaacaaggctaggtgcggtcgttcacgcctgtaatcccagcactttcggaggtcaaggcgagcggatcatgaggtcaggagttcgagaccagcctggccaacatagtgaaagcctgtctctactaaaaatacaaaaattagccgggtgtggtggcaggcgcctgtcatcccagctacttgggaggctgaggcaggagaattgcttgaacatggtaagcggaagttgcaatgagccaagattgcaccactgcactgcagcctaggcaacagaacaacactccatctcaaaaaataaagaaataaagaaataaataaataataataaaaaagaaatgaaaaacaacatcttgtctattttttccaggatcaggtgtaataggaaactggtgatgcactaagtttttcacagacatggcttgagaatattttctattttatatgcttgttaattttttaaaaataggattgtttgggagcttatttccactgcagcaggaagaggcactgtgattcactgaattgtgtgaattaaaggcatgatcaaggaacaggccattgaaaatgatggccctgcagtattaaaagtgctttgatcttctgttttgacacattgaatttatctttaattatatgtgatgacatttgattactatacacttagactattataatgtggtttgtaaaatatagtttgtaatgtataataacttcaacaccgatttttctgtagatatgaatttacagagtcatgttttagttttgtttaagagaaaactattagacttctgaattaacagacatttaaaaggtaaatatttagtagtcaggcaaagtatgattcctatacaataagtattaggactgtaccctgtgggactcagtgccttattttaatagaggtaatagaattctatgtggtggtttcctgatctatccactactggctgctttactacaggtaaatcacttagttctctgagcctttgaaaaatgaaagccttagactacatgatattcaagattttaattctgaaattctttgaatctattattctgtgacgtctttgatggacataatatagaattccatagaaattactgacacattttctaaaagaaagatatttttaaaatattgtgtgaattaatgggttttgaccttgcatttaaatatgaaaatgaggccgggcgcagtggctcatgcctgtaatcccagcactttgggaggccaaggcaggtggatcacctgaggtcgggagttcaagaccagctgaccaacatggagaaaccccatctctactaaaaatacaaaaaaattagctgggcgtggtggcacatgccagtaatcccagctactcaggaggctgaggcaggagaatcacttgaacctgggaggtggttgtggtgacccaagatcatgccattgcactccaggctgggcaacaagagcgaaactctgtctcaaaaaaaaaaaaaaaaaaaaaagaaagaaagaaaaaagaaaaactttaaaaatgcacttatgggacagtgggttggggggcaaccccccacaggccacaactgtagagagaactttcattcggaatttcctttattatgccagtaccttagccttgagggtgtgagtctttctttgaaattgtctgctttgcttgcatttacatgctcaaccctggatttttcccaatttaggcagttttattccccagcaatgagagtccttaagagtttgaacctgatcctaattctctaggggaaattacaaattattctttcttttcaaatggtagccatatacagtgattttacttttaacatcttttttttttttttttttttttgaggcagagtctcgttctgtcaccaggctggagtgcagtggcgcaatctcggctcactgcaacctctacctcctgtgttcaagctattctcctgcctcagcctcccaagtagctgggactacaggtgcacgccaccatgaccagctaattgtggtatttttagtagagatggggtttcaccatgttggccaggatggtcttgatctcttgacctcataatcctcccgcctcacctctgaaagtgctgggattacaggcgtaagccaccacgcctggccattaacatcatttaatcaattttgtcaatgtccctaatgggatagtcaggcaaaaacaaaccaacaaaattctgtaagaaaagtggctaattatacattatcattaggaagcataatatttcatgtgtttttatcctgaactttgtttctttttgccatacaacccgttccttactttgtagggaggacttttattgtaaaaaaaagatctgcctcacacaattattggttatgactatttatcacctaagaactaaacagtggtgctttgatttgagtttgtttactcgagaggcagagtatgttttatctgtaagtactttgggatttcttttgaactaaaaatatacaaatacaattattggttatgactatttattgcctaagaactaaacagtggggctttgatttgagtttgtttactaaagaggcatagtatgttttatctgtaagtactttgggattttttttaactaaaaatatacaaatatgtatagtttgtggtaagtaggtgacagcgtgaaaagcaaaactggaaagctatgatcctacagctacatatcaagctaccctttttttctcaaagactattgctgtgttaagattttattatagcatttgtttctttttagagagggtagaagggtgaagccttactcgaaaccatttcagagtagttaactccagactatatactaatggagaagaagagtaatacagataagttaaaacattagataatgattgctctttattgctttaaaaaaacatggggaagagcagttgggaataggacccaggcacttaaatctgggaaactcatttttggtctttttttcccactgctgcagtagcctgggcaggatccctagagacacagccttcaggcaggaagatggaggagagaaagcagatcacagaccctaaacatctgtaggttctctctctttcttgttccctacagctggtgaatctgaattgaatccttagtaaagtttcatattaggtgatttagtagatgctagttaaggaaaaatgatgatctctaagaattagcctgattttattaaaaaaactttgtggagattaacctaatttccttcttcttaggaaggctattagactgttgatcacagcagacaggggtctgaatttcatgaagttttttgacatggtccatcatgatatcactgtgggcagaatggatgagagggatatgatataaaaatacggttatgttgttatgcagctggctgaacagccatctgaaagagtgatatttaatggtctgtgttaacctggaaggagaactctgggataccataggaatctgtcttcaccttcattatatatatcaacaaagagttaaaagaaatatagctggcctactaattaaatttgtagataatatacagttgaggaaggatggcttaaattattgggtgatatagacaggagtcaaaattattgggtgatatagacagtctcaataaacataggagtgcagatatctctttgatatagacaggagtcaaaaaagctctaaaaatatcaggatgataggcttaaccagcaagataaaatttactgagaacaagtttataatataatatataatgctatgtattacagaatagaggagaaatggcttagatgtaggggtaggaaaaaaggcttaacgttcctaagttaacagaaaacttaatatgggcaactttgtcatgtttctttcaaaaaaatgcattgtgatcttaggaatgtctagaacattaatagaatgtctagaataagattagtagtagtcccgctttattctatgcatcggactattttgttctgattatcgcagtctgagagtgataagcttcaagcacatccagaagaaaatggctaaagtttttcacataacaaagctacaaaaagaagcctataaggagtcataatagctgtctcctgatatttgatgggcaaccctttggaaggaaggttagaatgagactgtgaagctccagaaggtaaagtgacaaccaattgttacatgaagatggattttgactccatataaagaatatttgtctggtccttaaagctgtctaaaaaatgaaatagactgtgctgggagttaagtagtgaattttccagggtgttgccaaactaccttaagggtatgtggtaatagaagaaatttattcatcagaaagggggtaaaactagttgatgtttagattcagtctactctttttggtggtgtgtttcctacttgtttataccaatttactctctgtcgtttggctaagaggcagagaatgtctttgaccataaattgataaacaggattcatctgtatatgttattatcaaaacatgcctgttacttttccaagaagctttattcttatctactcctaaaatatctttatgaagttaaaaggacttaacataagtatttagaaggaaaaatgttttttttttctaggaagcattatttatatttggcacttttttattagtgtcaaaaacaaggtgatcacactgcagctataagaagatagtgctatgaaatgaatatgtgcagatacatcagagtaaccaggttcattggtttgttcactcatttgttttttactcattcattaatttataaatattttttcggatacctggtaagtgctggtcgctctgctaggtactaggaagttgatatatactatagtttctctgaccatttacctaaaaatctgttaataggctccatttcttctaatcatccaagaaacatttttttaatttttaatttttgttggtacatagtagttctgtatatttatagagtacatgagatattttgatacagatacacaatgtgtaataatcacatcagggtaatcatgcttgagggtatggataccccatcttttagttattttaaaatgtacaaaaaattattgtaaactatactcaccctgttgtgctatttagccctatattttattaattctatctaattatatttttgtagccactaactatcccaccctccctccatcccgctacactccccagcctctggtcaccatcattctactctctatttccatgagttcaattattttaatttttagctcccacaaacaactgataacatgcgaagtttgtatttctgcgtctggcttacttcacttaacataatgaccaccagttccatttatgttgtcacaaatgacaggatctcattcttttttatggctgaatattactccgttttgtgtatataccacattttctttgtccattcatgtgttgatggacacttagggtgcttccaaatctcggctgttgtgactaggtctccaataaatatgggagtgcagatatctctttgatttactgatgtcctttttgtggatgtatacctagcagtgggattgccagatcatattgtaactctatttttagtggttttaggaccctccaaactgttctccatagtggtggtaataatttacattctgtcaacagtgtatgagggttctctagtaaacaattattactttgttttttgtgatgtaacctctaaagacaagtataaaagaaacactggaaaatactgatttttaacgctgtatgctagctattctaacaactatatgttaataacttaatatataactgttagtatatataataacagctgtattataactattaggtatccataaaaatatcatgcctttatgtactttaatattaatattgctttgaaactgaatgctgaggtagaatttgttttttcaggtttctgtttactgttaagagttttctatattttcttccttttccttttttggactgttgttaatttccatattgctttttgaaaggagaaataagatattgttaaggggcccaaaaatatacactaaccactgtttttttcaagaaaaaaaagccatttttttctcttagataaatattttttagctggttttaattttaatgtgcatcattgctaggtaggcaagaatgatcttgaaaaagaaagcttttgtaatattaagccaacaaagacattgcctgcaggataaatgaatagttgaacatattcactggttacatggtcaagttttatctttaacttattttaatataagatggttactatgtttcatattaagagtgtacccttttaacagtaccttataaataattcttaagcccaggtagggtgagttagaagtatctagttttacaattagaaatatgaaatgagaaatcagtgctcctttgtatgactaagctcaagcaggatttaaggcagggaggggtcaccactgattgatcttcaaatcttaccatgtctaagactgttgctgctgccatttgtctttctctggttttctaggattctttggcaaaatgttagctccttttcatcaatcttcccatctgcaactgatgattttctctagcatttcccataatcatctcaagattgcagagaaatagaagagatatttctacactcatgtttatagcagtgttagacacaataaccaaaaggtggaagcaacccaaatgtcatcagtagatgaatgaataaacaaaatgtggtgtataaatataattgaatattcagcttttaaaaggaaaaacattctgacacatatacaacacgatgaccttgaggatgttatgctaagtgaaataagccagtcacaaaaagactaataatgtatgattccatttatatgtggtacctagactgcttagcagattaagggatcttcaggatttggagtataagacacactcggccgggcatggttgctcacacctgtaatcccagcactttgggaggctgaggtgggcagatcataaggtcaagagatcgagaccatcttggccaacatggtgaagccccatctctattaaaaatataaaaattagctgggcgtggttggcacgcacctgtagtcccagctactcgggaggctgagacaggagaattgcttgaacctgggaggcagaggttgcagtgagccgagatcacgccactactccagtctggcaacagagcgagactccatctcaaaaacaacaacaacaacaacaacaacaacaacaaaaagaacacactcacaataggatataactaagtcatctactccacatgtccaaaactgggaacttaggatctttttctcacacatttatccttgctccttccatcccaagttagaaatatggatgtcaacccatactgcttttttcccccctctgaatactattggagaccaagccctgctgattttatattctttttttttttttttcttttgagacggagtctctctctgtcacccaggctggatggagtgcagtggcgcaatctcagctcactgcaagctccgcctcctgggttcatgccattctcctgcctcagccttccgagtagctgggactacaggcgcccgccaccacgcctggctaattttttgtatttttagtagagacgaggtttcaccgtgttaaccaggatggactcgatctcctgacctcgtgatccgcccgccttggcctcccaatgtgctgggattacaggcatgagccaccgcgcccggcctatattcttcatttttaaaaaatctgccttctctacattactggtacaatttattcattcaaggagtacttaattatatagtattccagatggtgtcagttctgtgaaaaaagaaaaagtagggtgggatgggagtttgggagtgtgggaggtggggagagagttgcaattttaaaaatggtggtaatggtggtccaggcttggtgcagtggttcatgcctgtaatcccagcactttgggaggccgaggtgggaggatcgcttgagcccaggagctcaagtccagcctggggaacaaagtgagacccggcctctacacaaaattaaaaaattagctgggtgtaatggtgtgcccctttggtcccagctacgtgggagcccgaggcaggaagattatttgagaccaggaggtcgaggctgcagtgagccaagatcatgacactgcactccagcctgtgttgacagagtgagattctttctcaaaaaataacaacaataataaataaataaataaataaataaataaataaaagatgttccataacggtgaaatctcagcaaaacctgaaggaagtaagccatgagaatatttggaaaaaaggcttgccagatagagagaacagtcagtgcaaaggctgcaagatgagagcatgcttggtgagttcaaggaactccaaggaagccaatagatctgaagtggagagagcaggaggaagagccatgggaaatgaggtcttagaggtaacaatggtctgcttatgtaggggttttgtgaggcactgaatggatggatgcattgggcagagaagagacacctaatttatatttttaagagatcactggctgctggttgatactaggttgtatgagcaagggatgaattagacaagctaggaggttgttggaatatttcaatcaagagaaggtagcttagacagagtggtcagtgacagtggaggcagtgagctgtggattctagaatttggaagatagagccagcatgagtttctaatagattagatgtaggatataagagaaagagttaagataaatctacgtttgtttgtttgttttttcctgtgtaagtgcattttacatcaacttagatgggaaggaaggctgtgggtagaacaggtttagaggggaagaacaggacttgttaactttgagatgtatgttaggtatctaagtggagttattgagtaggaagtcagatatatgagttcagaatttcattggaagttaatttgggagttgtatgaaaatacatagtatttgaaacaaaaaactagatacaatccccaagagaatgaatagacagagaaaaggaacaagaacttagcccagggcatttcaacattaagaaatatggattcaggcaaagtaggggaaaagagggaaccaacaaaggagactgagaagaagcaaccaatgagataagggatgaaatcaagagtatagtattctggaagccaagtgaatgaagagtatcaaggaggagagagtgatgcattattgccttagtttaggtcttagtcacagtcacgtcctaaattatgacagtttactttggtctttcggcctctagctgcctccaaccccttctctatacctcatctttttcctattgtctgtgatcaaaatgttctttaaaatgaacacagatggttttctttctatttatgctgtttgtcatttgttgagatgcttttacctgttttttgatattttgtcaaatatggtaaatttttggccattaatttttcacgtactgtcctgccctctcagcctacccatggtactgtatttacatgtaagttcaaccagttaatactgttccacagatcagcgaatctttgctaattttatttgtcttttttctttctgtgcctcagtgtggatattattgtgtgcttcaagttcattatctttctcgtgccaaatctgctattaatcccattattaatagtaatatggaaattgtgaatgtgatgctgatgaatgcagaactctattgtctttctgtaaagaatgttgagctttcttctaggaagtagtttgagtgaattgtggatcagtacaacccttttgacacttgttagagtttgtccagagttgtttttactctagggcagtggctctcaaagtgtggtacctggaccaacagtatcaatgtcaccttggagtgatgcttagcaatctgtgttttaatacatctctaagttattgtgatgtactcttaacttttaaccttttacccctttagaaaatataagtgcagcttactgccagtgcttttttaacgttacataaacatgggtctttgaggctgaagcaaatctgactgattttcaatgtggaaataaaatataaaaactgttcttagagttatttttaaactgaactaacatcagaatcacctgaatcatcagaatcgtctatttcggaaaaattagattcagccaataactgtttgagaactgtgttaacatcatgtgtaggaatgctatgttttctaggatttgacatttttggtgattgagaattactacattttgtaaatggatatatcactaccaaaaacagaatggtacaaatagaatgatgtattttgtttccaaagttgatatactagagcaatgtgaaagtaataattaaaatgagatattacatggcaaagttatctcagggtaaacgctgcagccgcaagtgccactggtgagtattctctgggcagatgggaaaaggatcaagaaccactactctggagctagttcagccttactactaggatgtaacccttctggagtctctgtgcagtgctctagatattcaatgaggtctctctcctttaccttgtcaaaatgtctcacagtcttatatgagtactgggaattatttagattaacattcatggtactttgtttgttcttatggaatttactctatgtatgtgcagcttaattttcagtcatagtctcaaggggaaccctgtgtagatttcctgagctcttctctgcatagctcttcctctttagcactctgccctgaagagtccatctctttcctcctctttaaactctgaactctgtcaccctaacttagtaagacctctgtactctgcttggggttatcattccttgtggtgcattccagaaagtgcttccagacagacatcagggcgaccttgttcattttccttttctcagggatcacagtcttaacactaacttttgtctgaggtgtgacagtaacttttttgtatatttttccagttttttcagtgtttacagtaggacagatctggtactagttattctgttatagctggaagtccaggtacttattttttatggtcatgaggctacatagaagctcattatatgaggaaaataaatgctgtactaatttcttcacatgatttcaggcagcactagagtgctatatgatacatattaggcactgtgctagcataggaggattaaaacccaaatgggatagtgcctttgtcttcaaagatctcatgacctacaagagtggactggtatataaacaacacattccaagtcagtttgtgataaaggcagcatgaaattatataaaggccatagactttgaaatcagataggctttggttaaatcccaactccatgacttactattgtattatgcaacctctcacatctttagttttccaactgcagaatggagataatagtacgttataggacttctgagaaggttaaattaaaattcttttataaagcacttgacttggcatatcatagaggttcattaagtattaggtttatttcccgttagaatacacataggatagaggagcagttaatttttattattactatagaaatcttcagggaggaaatgatatttaaattgtgccttgaaggtggagtagggttttgatatgtgttagatgggttccaaggacattctacttttaaggaactaaatgagcaagggctcaaaggtgtaaaacgtggggaaggctgtaaatacacttatgaatgtcagcatagtccagaaccttaggaaaagcaatttaggtcttaaaaacaaacaaacaaacaaaaagacaacaaaaaactagtagtaggaatgtaaaaatgaagaaaaaaagaacaaacagaaagtctaaccccatagtaaaagtatacttccttaggccattcctatttattgccatgactaataaatttgggaatgcctgtggaaaattcctgtgggctgatcttttcttaaccactattcaagactgctttacgttgatagtctaagccgatcatttcattaatattaaactccagagctcattcccgagtttccaagaatttgctgaattgcttttctctgttatctgcttctttgggtaacttccatatttttctttcttgccctgtaaaaattgatttcctaggttttccaagtgattgataatgtgacagtactataaagacttttcttagactctggtatgttcgcatttagtacaaatactgtcaagggttttataaagtgtataactaatatactttctacatatcttttactagggaattctaaacttaagtattttatttcattgaggttaaaatatgtcctgttaagattttttttctcttttaaattattagtgttttgcattgttaaaaatcagctggcttcttggattgagtttacttcacttttccagtgggtaacttttatctgacctttaggtctgtaattgtttggtttgttttctgaagctatggaatgttttggaaaaaataagcctcatggagaagggctattatccctgaaaatgatgagaccggaaatgagaaaagcaaaaatcagatatcacccttgaccatgtggatttcagtttttaaaaagtctttatcctctgtctctgagaaccattatttggaagtctgtttctctgcctctctgtgataagttctcaccaaagatcctcttgtgtttttattagaattacatcgaattcataaattggggagaatttatgtatttataatattgaatcttttcatttatgaaaatggtttatttctctatttaggtattctataatattatagacttttgtcctcaaagatcttacaaatcataatttggttagatttattcatgggtttttaatagtttttaaaaaatgggatctgtttttattatgtaatccaatcagttcttggatcagaaaattgatttttatatttaaagtccagcaaaactgctttgcatgcttattaaaatggcttgcaaactatcgtatattttctatggaatcatatatgcagtagcagtttttcttctattccaaacctcatacttctttattcttgaatagaagtgtcatagtgggattttttcttattcctgatttccggagactccaatatatcatttttcattttagaaagtttatttttcttgctatattggtggaagcttttttcttaagtgatgaatcaatgtaaaattttatacttttttattttggaaatttctagtttattagggtcctcttttaatggacaaggcagtagagactcaaaaaggtaatggagtttatttatttatttatttatttgattttcaacttttaagctcaggggtgcatgtgcaggatgtgcaggtttgttgcataggcaaatgtatgccatggtggtttgctgcatagatcatctcattacctaggtattaagcccagcatctgttagctattcttcctgatgctctccctcttcccatcccccaccatccaaggccccactatgtattgttcccctccatgtgtccctgtgttctcatcatccagctcctacttacaagcgagaacatgtggcgtttggttttctgttcctacattagtttgccgaggataatggcctccagttccatccgtgtccctgcaaaggacatggtctcaatttttttatggctgcatagtattccatggtgtatacgtaccacattttcttaatccagtctatcactgatggacatttaggttgattccatgtctttgctattgtgtatagtggtgcagtgatcatatgtatgtatgtatctttataacagaatgatttatattcctttgggtatataagcagtaatgggattgctgggtcaaatggtatttctgcctctaggtctttgaggaatcgccatactgtgttctacaatggctgaactaatttacactcccaccaacagtgtaaaagtgttcctttttctctgcaaccttgccagcatctgttgttttttgactttttaataatagtcattctgactgatgtgagccattgtggttttgatttgcatttctccaatgatcaatgatgtggagctttttgttatatatttgttagctgcatgtatatcttcttttgagaagtgtctgttcatgtcctttgcctactttttaatgtttttttttccttgtaaatttgtttaagttccttgtagatgctggatgttagacctttgtcagacagatatattgcaaaaattttctgccattctgttagaaactataatcagcttgatgatagtttcttttgctgtgcagaagctcttcaattagatctcatttgtcaagttttgcttttgttgcaattgcttttggcatcttcatcatgaaatctttgcctgtgcctatctgctgaatggtattgccaagattttcttcttgggtttttatagtcagggttttacatttaagtctttaattaatctcgagttgatttttgtatatggtgtaaggaaggagtccagtttcaattttctgcatgtggctagccagttctcccagcaccacctattaaatagggactccttttcccattgcttgtttttgtcagatttcttgaagatcagatggttataggtgtgtggtcttattcctgggttctctattctgttccattggtctatatgtctgttcttgtaccagtaccatgctgttttagttactgttgccttataatatagtttgaagtcaggtagtgtgatgtctctagctttgttctttttgcttaggattgtcttgggtattcaggctcttttttggttccatatgaatttttaaatagtgttttctaattctgtgaaggatgtcaatggtagtttaacgggaacagcattgaatctgtaaattgctttggacagtatggtcatttacatgatattgattcttcctatccatgagcatgggatatgtttccatttgtttgtgtcatctgtgatttctttgagcagtgctttatagttctccttgaagaggtccttcacttcccttgttagcctgggtattttattttctttgtagcaattgtgaatgggagttcattcatgatttggctcttggattgcctgtttgtgtataggaatactagcaatttttgcacattgatttttatatcctgagactttgctgaagttgcttatcagcgtaagaagcttttgggttgagaggatggtgttttctaggtataggatcatgccatttgcaaacaaagatagtttgacttcctctcttcctattcgaatatcctttatttctttctcttgcctgtttccctggccagaacttccagtactacattgaataggaaaggtgagagagggcatccttgtcttgtggcagttttcaaggggaatgcttccagcttttgcccattcagtatgatattggctgtgggtttgtcatacatggcttttattattttgaggtatgtttcttcaatacctagtttattgagagtttaaacatgaaaggatgttgaattttattgaaggccttttctgcatctgttgagataatcgtggtttttttctagttctatttatgtgatgaattacatttattgatttgcatatgttgaaccaactttgcatcccacggatgaagcctacttgattgtggtggataaactttttgatgtgctgctggattgagtttgccagtaaaattttgtaatttttaatatctactaagataaatcatatggcttttttatcccattaatgtggtagattatgttaatggcttttgtagtgttaaatcatccttgcattgccaaataaactatacttagttatttaaaaagaatatattgctgtaatcccagcactttgggaggccgaggtgggcggatcacaaggtctggagatcaagaccatcctggctgacacggtgaaaccctgtctctactaaaaatacaaaaagaaattagccaggtgtggtggcgggtgcctgtagtcccagctactcgggacgctgaggcaggagaacggcgtgaacccgggaggtggaggttgcagtgagctgagatcgcgccactgcactccagcctgggcaacacagcaagactccgtctcaaaaaaaaaaaaaaaaaaaaaaagaatatattggtggatttttttgttactattttgtttaagaattccttgtagtttttgtttgtagtaccgatttttctttctagattatagaagaagctcagcagctttcttcattttctattctctggaaaaatttttataacataggattttctcatcatgaagatatggtaaaacttatttccacatcctccatacttgatggagtttctaagtaggagggcttttaaaaataatttataaattgaaatataatgtatttatgggaaaattgcacaaatgataaatgtagctgtagctcaatgaattttcacaaactgaacaatctcatgtaaccagaatccagatgaagaaacaaaaaattaccaatgtcccagaagcccccactgtgtgccctttcagccactgccttttctgagggtgaccacctactccagtttctaaactgtgtattttaggggggtttggttcgtttttgaactgtatacagatgaaattatacagaatgctttttttttggtatatggcctttttcactctgtagtgtatttgtgagattcatcatgttgtattgtgtagttgtggttcattctgtttgctgtgcagtatactattttgtgattattcatacaatagaacatattacatatttatgtatccattctaccattctactgtgtgtgtgtgtgtttttttttttttttttttttttttttgagacagtgtctctctctgttgcccaggctggagtgcaatggcagatctcagctcactgcaacctccgcatcccacgttcaaacaattctcctgcctcaggctcctgggcagctgggattacaggtgcatgccaccacgcccagctaatttttgtatttttaattgaggtggggtttcaccatgttagtcaggctgatctcgaactcctgacttcatgatctgcctgcctcgacctcccaaagtgctgggattacaggcgtgagccaccatgcctggcccattctactgataatggagttttgcatgccttctagttttagcctagtgtaaatagggctgctatggacattttggtggacttatttgcacatttctttcaacctaggagttgaattattgggtcatcagttatgcatgtatttagcttagtgatgttgccaaacagttaagttgttgaactaatttatattcttaccagcagtgttggagtactggttgctgcacattcttgttgggcttcgtatttaactactatattttagctactctagtgggtatattgaataacatgtagtatgctgttaacttgcctttctttgatgattaagcacattaaacacttttttcatatacttattggttatttgtataattttggtgaagtgatgtattgcttctcgacatgctataaagaaatacctaatactgggtaatttataaagaaaagaagtttaactggcttatggttccataggctgtacaggaagcataacggcttctggggaggcctcaagaaactttgaatcatggcaaaagacaaaggggaagcaggtgcatcttacatggcaggtggaagagagagaggagggatgtgctctacacttttagcaggaggaagagagagaggaaggaggtgataacacttttaaacaaccaggtgtcgtgagaactctatgaggagaacagcaccaaagtgatggtgctaaaccatttatgaaggatccacctccatgattcaaacaccttccaccaggccccacctccaacattggggattatacttgaacgtaagatttgggtgggacacagatccaaaccataccaagtgcctactcaagtttttgtccatttgagttgtctgcctttttcttaatgacatgcagaagttctttatatattataaataccaattctttgttgattttatgtactacaactagcttctctatgggtatatttttattagttactcagtttttaaatagttatccaaactttctatttccttttgagatctttttaataacatttttccagaaagttgttgatttatcttaatttttaaacctactgataaaaagttgtttaatctatttttggtatcctttcaattattctagaaaattattagttgctatcgctttaaatattgcatatacaagtatatatgaggatgtgtgtgtatttttaatataactggtagcatactttacatactgttttgtaccttattttcttcacttaatatttcttggaaatccttgcatttcattatataaggagtgcatcatttaaaaaatactttcatagtatttaataatattatgtgataatatatttacccaattttttattgataggaatttgaattactgctagtcttttgctgtaccaagcaaagctgaaattaggataaatacataaagtggaatttctggtcttataaactcctgggctgatgatagagtattaacttttatgtttatgttccatttttaatgttttaagtcttttagaaattgagatataaatgacatgcaataaaattcaccattttaaagtgtacagttcagtggtttttactttattcatggagttgtgcgatcactaccagtatataactccagaacattttcatcatcccagaaaaaacccttagtagtcactccagattcctgctttcccccagctcctggcaccctctaatctattagttttctgtcactgtgtattcgtctattctggacctttcatataaatatagctatacaaatgtgatcttttgtgcttggtttcttttacttagtataatgttttcaaggctcatctatattacaacatgtatttatgcttattttcttttatgtatggtcaaataatatttcagtgtatggatataccacattttatttgatggttatttgactcagttttactttttgtctattatcaatagtgctgctatgaatacttgtatctacgttttgtttggacatgtgcttttaattctcttgactctatatctgggagtagaattgctgggttctatagtaatcctatgtttaactatttgaggaactgccgaactgtttttctcagtagctgcaccattagcactgtgtgaggttccaatttcttcacacttttatcaacgctttttattttccttacaaattaaaaaaaaaattatacctgctattctaacgagtatgaagtggtatatcatggttttgattttcattttcctaatgtctaatgatgttgagcagattttcatgtgctgattggatatttacatctcttctttggcaaactgtcttttcagagcctttgcctcttgtttaattgggtaatttgtctttttattgttgagttgtaagagttctttatagagatacttatattatgtgtgttgataaagggcaaatatctccatatgaagtgttcctttatgttaatgagagtaaaaatgctaacttccaaatagaaaaatggccaaataatacaaaaaggaattcacagggaagaaaaacaagtagctaatagtaaaaaaataaagaaaaagcaaattacattactgaaataaatgcaaattggaatgatgacttttttgcgtattatatttttaaaaatatgattttttttgtgggtgagtatggggtgaaactctcaggtaacataggaaatgtaaattgattacctttgtagaggatatttggcaacattataaaattatatagaatatgtctatataatttgaatcagtagttttacttcttggaattttttctgagaaaataatcattattttgcatatagattacatacagtgatactcatgccagtatcatctttaatggcataaatttataatcagcaagaggatggttaattacatatagtacaatattttaccattgttaaaatttatattttaaaatatagacaaattgatcttcatataatgttaatgttaagtgaaaagtagtaagatacaaagctgtgtaaaatgtatgataacaattcataaaaagcaacattcacccacacaaaaacctccaccaccacacacacacagaaataagagtgaaaataaacattccatcatattgacagtgattaccttcgggcggtgtaattaaggttgatatttattttctcctttatgtagttctgaatttcccagatttttaagattaaatatgtattgctctctaactagggaaagaagtaaaataattataaataagatagattaaatggattattatggtgcagtgagaccttttcccattggccctgggattttcttcctttggtttatgagtttaaagtgttgacagttgtgaactagtttgctaagtgataggaagcagtgttgaaatgaaatactttaaatcctgaagatttatgaggaagaaaatacttgggcaaatagtgtcaatgagtcctgatacgtattgctaacttgtcactagttcactttacatctgtgtagtgataactttgttttttcctccctcattgattatagtctctcatcccaccatttgccaaggccgtgtaaatagtttgctgtcgtagagatacgcagcaggcccatttgagtagttctctttcactctgatctccttagaaacctatcacttttacctttaaatgatacatttttaaaaaactattgttgttgttgaatgggatttccctaaataagaagagccatctccctagtttcaggattgtggcttctttaattgtaatggagttttaatattatatctacggtggaaatcagagtcaattcaatcttattttgcatcccctgtatgctatcatactgattaggggtgtaacaaagaatggactgtgatttttgccattttgtggttttcactggagattttatagtacagagggagagaatggcatagtaaataaaagaatgagcttagaagtgagactttgtgggtttaaatacctgctctctaatttatcagtttgtatttaacttctcaatatccttatctgtaaagtagaaataacagcactatcattcatcactttctatttccttatctttttgccttttcttcatggaagttttcacttccaagacattatgtttttcttcatttatttacagtaatgtaaaatcctggaatacatgtacctttttggttcactcatgtatttttagtgtctagtgtagggtttgctacataatagctcctaatattcgttccttctactgggaacttcttccaacatgaatatccatatagcttatccccatgctttatttagttccctgctcaagcatcacctcactagagagaacttgctagacgacctcttctataaaatagcaccctttagttttctctattttttcctgctttatttttcttcataatactttactgactgctaagtagtaacatcaatttatttttatattttcgagtgccttgcaaaaattagggtcttcataaatgtttgtttaactgaaattaattatcttagactattctatcttattctcatatgtaataaattaccagcttgtgactgtttatttctaggctccttcaacctattcatttgtttctatgcttatttccacttcttttttcactacactaattcagttaactgccacctgttttgtgaacaattgagtagtttctcaattttgttttgttttcctccagttcctcaacctgcacaaaacatctagcttactgctcttcaaatatgctattatcatttcattctttttcaatggcttcccataatccattgaattaaatgatattcaaatctctttatatctaattggaacctacctttccatagcactaaggagagttgtaaggaggtgagtacttggtgtaaaaattgcttatagatgtagttagcttgctatgagattaaaatgatttttaaagtacagagaaaaataagaaataactttaatgcaagtcaatatataatcaactgattatacgtgatttagtccacagatttatagaaattcagataaaaagatcattgaaaccttggctcatcagagagagcttcattagaaaaactgatagttgtttggggtcctgtatcatttattcattttatttattcagacccaatttctccctgtttttctaatacaaatatataagattttagagtaatggattctgttttgttaatataaaaatatttcttgtgtcagaagaattcagatgcttatagatattcttgtaaaatgttattatttttaatgagattgggtcttattccattactttgaaaatgtatacaactgagctgtttcttctgatcagcttatactatggacacttagtttgaagtcatattggaataatttggagaaaggtagaatttagtagatattacagaatttaggtatctattgtaaaatttaggttttatatagggcatgacattttttaagcgaatttataataaatagggctttttcaattatacagtaatgtaggttccaaagtgctattttgtgggttttctgtgtgtttagctgttttgtctgtacttatatttgtatttgtattgtacaaaggatataagtttctttgtagtttggataatcttttggatgaaagaaaggtagtgagtcatacaaaatagtgaaaaaaatcagatattttgaaataatacttctaattttccaaggatttaccaaaatagaggatgttaatttttagtatgaatttttaatgattggattggttttctgatgactgttttaattagttctgcagggcatcccatttctatcaacatagtgtgtgcaacaccttatttaccagtaatcaactcatatctactctcagtctgtaaagaggggtgtatatgaacctttacttgttattttttacttacgtaaatttatttacttttacattcctggtcaaagtgaataaacattttttatacagatgagttcatttcctcactcccatatccattccagtttctaagagccttctgattaacaggctccccaaaatttttcccttccaatttaaatttaagtaattagctttttcctaatttggaaccttggttagaaaacacatttgtttgatttgtcattagtttgggcatcttacttcaaatgaggtcatgtagctttgagtttagatgatcacagaagtgttcactgagcagcatcttcgtagctttgaggaaacagaaaaacaacttttttctactttgattatgattctttttgacagttgctttaactacagttaggtactggctgtaccagttccagtttaaacaactggactctgaacctgtttttgttctgattaagaagtttatttatatgttcaggaatacagcggcacaacctgttaacagctgtaaatttgcttgattaagctgtgtgtagacaaatttactagagggaactgttccctaaaaattccagttcacttacatatgaagttagtctggctgtttctcaccagtttccatcatttcctgccaagaataataaacattttcttgcaaagcatcgacactaaaggttagaagtgttcagtgttttatcaatcacactgggctgtcatgaatctcaataaacaaacacagagatatctatgtggatgcctggagaagccgttagaccctagaaaaataatttctttcagacagtatcctagaccttttcaaagtagataaatgtcaattatgaagagacatttattgtaatggaaataatggattcttcggtctagattttcatttactgacctagttcagggaagcttgtacttttagtggataataataagctagagcaagaaagtgtgttttcttaatttcatataactgtagatgctattatgagtattataataaagatgggtttattaatttaaacttatagtattaacatttctctaccatggtctgtcaggcaaactgtggctcacgactggtgcacagcgtgttattgtagcactcacaagttaagaatgggtttatagttttaagtgattgtaacaaacataaaacaaagaattttatatatatatatctagagagagcgagagaggagagagagccctcaaagtctaaaatatttattatctggccctttaagataaagtttgccaaaccctggtctatattagtagtaatagtttactaccagcattcaaaacgtgccagcaacaaagcaggatgaaattatagtcttagtgttagggtattttatttcttatttagtgttaggatattttatttcttatttgcatgtggtatataaaataaaaatataacagtatccttatagggttattgggagcattaaatcataactttttgtggtgcttcttacacatggaggacaataactgttttgttagctgttgctgttgttatatgtcagatgcctgacagttgtttcaactttgttttatgtgtgtatcttctgtttattctctgctctatttgcattatgtttaattttgtaagtcttttaaaaatctttttgattttagttgcaatgcaaattttaaaagtatagcagttttattgttcccattcctgtggctgtgtaacagattaccccacaacttagtggcacaaagcaatcagttattatgctcacagattctgtgggtcaggaattcggacagggcacagcaggaatggcttctcttagttccacagtgtttgaggctggaacctcaaaggctaggcactataatcattcattcatttatatgtctggcagatgtcactggctgttggccccagttcctctccacatgggtctttccatgtgatgtctccaaatgaactagtttgggcttccttaagtagagtgtctgggttcctcagagcaaacatttcaaaaagagaaagataggcagaagctatatccttcttatgacagagccttggaagtcacagaacattatttctattttgctctgttggccagaataattagaaatccccctaggttcaagaggagagaaatagactctaccatgtgatgggtggggttggcaagattctggaagagcatgctggaccagaaatacggctgaagccatttttggaaatatgatctgccacaatgatattactttatttaataattgcttatgtagcatttaatctatatgctagggactactgtaaatactaaacaaatattaattcatttaatccataacagtcttattttacagatgaggaaactaaatcagaatattgtattacgtagaatataactttctctgctcttgatggacaacaaataatttactatgattttaaaaacttgtctagtattatttaaacattaaatattttggatgcaaatttgcatttcctgcatgcatcatattagaatagacttgagaggtgcagtttctattaagtaatgtcttaaataagtacaaaggtcaggcatccaggagctcatccttccatattcttagaattgggatgtgataaataagtcagaattttttcatgaagcagtgcccagatgagtacatgttatcaaatattttatttgataataatgcaggactgactgaccaaacttgatttataaattagttccatgtccttttatgagaataaatacaatatcttggtcttgttgtgataatattacctaatggctatgttttccttcattggcattgaaatcagaactgatttttggtaaggttagtaatttgcgttatttttaaatctccattattatgaagatattttatcagggacaaagattgccttttctctctccctctccttttcttttctttctttttttttttttttcccattaacagttgatggaggaaggtaactttgtatgagttattgttggacatgcaagccctgtttttttacatttgttgattctgctttggagatttatcagtctctgagcaagttgctttgaagcatttcagtcttctttgtctctcagaacccattagtgctatcttcaggatgtgccagagtgacttttaccctggtacatttgtgacacagttacaccatatctcctactctctactcatcactgtatagcaagtacaagttaccagatagaagcatattcttgttggattatcaaaactcaggtggagtgtttaacatcttttttgaatatttaaatagtgtttttctttctaattggcaaattttgggtattctttaaaaacaatatttgattaggagatcatggagaaatttgtatggtcaaaacttgccaaatttgagactcacttatttgtttaaatttaaggatcagtaaaaataaataaataaataaataaataaatgtaggaatctaagatagagacctgtactattctgaatgtgaatgaactgattacattgattggaatacgtaatttaggagcattcattattactttttgacttggaaacaatataagaatgaatgcaaaaaaaaaaaaaaaaggagcatgtggattcattgctatcttgtttactgctcagtcacttatttgagagtgccaaaccctacccactagggccacccgggatgctttgtttatttgagagggggtgtggaggcatggtgaagggcaggagctccagagttaggctgactgggttttaaacccagccctcctgccatctgtgcaatcttggtccagttacttaaaacactctgtgattcagtctgcttttctgtaaaatggctgagttttctcattggtagaaatggcatctacttcatggtgttgtaaacattaaatgattaaatatatgtaaagtgcttaggatagtgcttagcacattataagctcataaatgtgcgctcctattcattaaatcattctttcattcacttattaaaagcatgacatttatttaacacctactatgatggggatacaaaggtgactactcaggagatatgaatattataatagggggaggcagaggtatattatagtcattacaacatacgatggtgtattagtctgttctcatgttgctaataaagacatacctaagactgggtaatttataaaggaaagaggtttaatggattcacagttccacatggctgggaggcttcataatcatggtggaaggcgaaggaggagcaaagtcatgtcttacatggccgcagagaagagggcgcgtacagaagaactgccctttataaaaccatcagatttcgggagacttattcactatcatgagaacagcatgggaaaaaacctgtccccgtgattcaattacctcccactgggtccctcccatgacacgtggggattatgggagctgcaattcaagatgagatttgggtggggacacagccaaaccatatcaggtggagagtgatataggttataaaacaaatatgtcaaagtgccatgaaaagaagaggacaaaatttttgatagccttaaacaatcgtttcacttttctctgacaccatttattcatttataaatgccttaccttttatggaacttttacagttcttcagcaggaaataatctctcctttattggcatccctatatcattttgccttatggcaattattattttctatctttcttttggcagctgttgatagtaatcattttgtatcttgttaaatcattatttgttcctatcttgtccattttacttgaagacagttcacagtcactcaacacagtacttatcaaaaatgcttcaaaaatatttactgagtgagtcaggtaacaaaacgattaaaatgcttagccatcagcgtatgcctctattttttaagggctttttataagcaaatacgggtagaaaaacattggcagtttgagagtaaaataaacatatataactcaccaactgactgatcaggataattatctgggagtctctgggggtaaaaagcccccagtttgttccattttacaactcccaccatggcctcagtcaggccaccaacatgatacaactagatgtggagtttggaagggtgtgcactggaacaccatcatatagtaatcctgccaactggatacaatagtgtaagcaaccccaagagcacagataatagtaaaatgtccaacatatttaacaaatgaggtgttttgagtatttattatctttgttttaatataatttttatttattggtacatttataacatttagctttaaatgatggctgtgtttaacaactggcttagaaaattcctgaaaatttagtagtcagctcttgtgaaagagtacaagccaactcacatacacttttacccaggctctgctgactgtgtaacttttgctagtaatttcactcctagaatctgtgctaaggaaattatctgtgaattggaaaaagcacaaagatgtttatcatagcattagtagtaacagcaaaaagttggaagcaacctaattgtttaaagtgagctgtggttaagtaaattcactggaatgttttctggaattaagtgacttctttgaagactttataacaacaagggaaaatgccataaagttaaatgaaaaagaaaaaagaaagaatgctaaatatctaatttatatagaatgatcaaaatttaaaaatatagacatatgctaatggaagaaggaaatgtcagtgtttggagctaataaggacatggctttttttctttaaccctttcttcattttccaaatttctaataatgagtatattttataattataatgaaaagatatatcatttttgtcacaaaaccaaattctaatttatagctctagttttttgttgaattacaaggcattatcaaaataaatcttttttattttattttttttgagatggaatctcattctgttacccaggctggaatgcagtggagtgatctcagctcactgcatcctccacctcctaggttcaagttattcttctgcctcagcctcctgactagctggaactacaggcacgtgccaccatacccggctaaatttttgtattttagtagagacaaggtttcaccgtgttgcctagggtggtcttgaactccggagctcaggcagcctgcccaccttggcctcccaaagtgctaggattacaggcgtgagccaccacacccagcctatcttttttatcttagaaatttaatattttcctctaacaaccaatagagcatataccaattgaatttgttttttagagatcaatgctgagttcattttgcccctagattttatttacagtctatcatagattttcatggaggattttaaagtttgaatttttcaaaagtatcctacattacaaaataaattttaggccaggcatggtggctcatgcctgtaatctcagcactttgggaggccaaggcaggcagatcacgaggtcaagagattgagaccatcctggccaacttggtgaaaccccatctctactaaaaatataaaaattagctgagtgtggtggcacgcacctgtagtcccagctactcgggacgctgaggcaggagaatgacttgaacccgggaggcggagattgcagtgagctgagatcgtgtcactgtactccagcctagtgacagagcaagactccgtctcgaataaataaataaataaataaataaataaattttaactgcagaattacctatttaaaaagctgcttagtagttaagtagctgattgtccctttaaaacaattgatagttatattgttctaaaattgagtctgggtctgtgtgtcccacattcgtgtctaagctatgcattgttaaaattttatttgaccatttatagcttgtctcactttgtgaaggaatttttcagaccttttcaaaatacatttaaatataagcagataatctaattttacacacttcctgtcccctttttaatcagtaattggttaacttcaatagacaatttagacaagctaagcttctgtgtaatttttctccctaaagattaagatttgatgaaataaataatctgtagcgtaccttgtagaaggaaaatgctttcctaattactttttaaaggtactaatttaaatgtcacagcaagttctgttaaggttttacttctattttaaggttgtaatatctgttaccactctatttacttggtgtgggcgagtttcaacaaggattagattttttaaattaattctctatatttttatgggggagaaattgaagcattccattatattgtaggaattcccggaacttcttagtattccttttctaccttgttaaaccattaatttgtttctatcttattcattttacttgaagacttaaacatttctgtatcactgacagccactcaaacagtactcataaaaaatgtgtcataaacatgtactgagtcaagtagcaaaaccttttaaattattcagctttttatgtgtctggattttgagtcatagacttgtgtgtgccatggggtataatgaatgggtaatggactttggagtaaataagcctaagttcaaagtctgattcttccatttaccagctgtgaaaacttgggtaattattctttgggcctcagacgcatctctgaaatgaatataataatccctagcttgtggagttgctgagaggattagagataaaatatgtaatgttccttgcatatagtaagcattcaatacatggttagttattaggcattcagtaataattgagtggatgactgcttcagggaaaatttggtggctgatttactgaaacacccagtaaacatatatgaaaaaaaaaaacacaccaaaactgacttttagttagaacagtttagagaaactgagagtcagtttataaaggagccttgcaaggaaactgaaaaggtgaaatagacgggaacaaaacctacagagtaccgctgcagtggagaaaagaagtttcagaatgctagaatggtggcagtggcaaattctatagtgaattcaaacaagaaggtcaataattggtcatctctggatttggtcacctttgttatttcccaatttctgtatattctttttatgatcatggttgacaaaagtatagcgctgaacataagacatgctaggaaggaaaatgatttaggaggtacagttgattcttgaaaatcatgggtttaactgcatgggtccaattatatgtagatttttttcaagcaaatttccattgcaaatacagtatttatgagatgcaaaacctgcatgtatggagggctgacatttcatatatgtgagttccagagggtggactttggaacttgagtgtgtgtggattttggtatatgtggtgcaggagtggccctggatccaattcccagtatatgccaagggatgactgtgattttatcagttaagattaggatgactgcgtataacaaaaaaagagacatctatcttatttcttgttcgttcttaccgtattgccacattgtccaatatggctgctagagattcagccattgcatcagtattacagctggcaggaggagaaaagaccaaaaagaatgtgccccttccctgtaaggacatttctgggaagttacacattgcactttctctttggctaaaatttagttctatggccacagctaactgcaagaatgacaaccagaaatattgtcttttggctgagcatagtgtacccagctaagctttggggttcttatttttaggaagcagaggaaaattaccagatcataacaaggtgatgagcatggcctctaatcctgcttttcttttctttctttttctttaacggggtctcactatctcacctagactggagtacaatggtgcaatctcagctcactgcaacctctgtctcctgggctcaagcaatcctcccagctcagcctctcgagtagctgggaccacaggcacgtgccaccatgcctggctaattttttatatttttcgtagagcccagggtttcgctatttgcccaggctggtcttgaactcctgagctcaagcaatctgcccatctcagcctcccagaatgctaggattacaggtgtgagccattgcaccagcctctttgcttttttaatgttttaactctcagcgtcttttaaaaacatcacttaaagttactttaaaattacactagaaatacacttccttttagaaaaaattaggaaatatagaagactaaaaaataggaaaaaactacctaaaattgtccactattaacatttttggtgtatatctgttcagactttttctgttaatatgtaaatattcatattacttatatatatagagtttcagtttgggatgatgaaaaggttctgagatggatgttgttggttgcgcaagactgtgaatataggtaatgctactcaactgtacacttgaaaatggtttaaatggtaaattttatgtatactttactgcaatttaaaaaacattgattgtttacaaaaaggagatcaaactcaacatattattttctaatctgctttttagaggtaagagaatacctttccatgtaaaaatatatatgtttgcagcatgatttttgtggctgaatatttattttatcctttaggtgtaccaccttttattgacaagagtgttgaagcaaataaacaggagtgttagttctttccttgttaagtggattcacagagagctttgtgatgcatgagagaggacctggggaaataaccagatgatggaaactgaatacccccctgggaccttacactgtgtctgccttgttcaagtgactctctaaataaacagttttactgctctgaggacaatatagtacccttttgtttttttcacatataattattatttttagttcatctaaaagaatgtcccaactaagttaatgttctattagaggactcagggcaaaagagagggataaagggagaacattgcctcctgagaaatgatgccttcacacgaggatcagatgccagtgatggcagcaatgtctgcaatttcgatattgctaagccactctcaggaaggtttttcctgattggaggtctggctctcccgtgagatggtgtttctcttacagccagaatgtttgtcattttcccatatcttcactgtcacagggtcattgtccttctaagtcttccctgccacttttagaacgtcattttttcacctactataaaatactctgcctctttgttatatgggtaaacaaattgctacctagctaaactaagtgttatttcttttctgtgctgttattgacatttgtcccccaactcccttccactttactcttcatcttatttacaggcataccttggagatattgtgggttcagttccagactgctgcaataaagcagttatagcaataaagtgggcaacacaaaattttttgtttcctaatgcatataaaacttatgtttgcactgtacggtagtctactaagtgtatcatagcattatgtctaaaaaatgtacaagccttattttaaaaatatggttaaaaaatgttaacaatcatctgtgccttcaatgagttgtaatctttttgctggtggagggtcttgccttgatgttgatggcttctgactaaacaggctggtggttggtgaaagttgggtagctatggcaatttcttaaaataagacaacaatgaagtttgttgattgactcttgaatcagtttatttgcttggtaataagagtagtacccaataggtagtttttcaacctatactcctctccattcctcccacccctagtagtccacagtgtctattgttcccatgtttatgttcatgtgtagtcaatgtttagctcccatttataagtgagaacatgtattgtttggttttctgttcctgcattaatttgcttgggattatggcctccagctttctccatgttgctgcaaaggacatgattttattcttttacatggctgtgtagtatttcatggtatatatgtaccacattttctttatccgatccattattgatgggcacccagattgatactatgtctttgctattgtgaatatcctggtgatgaacatatgagtgcctgtgtctttttggtagaatgatttattttctttcaggtatatccccagtattgggatggatgggtcaaatggtagctctgttttaagttctttgagaaatagccatctgttgttttttgacttttagtaatagccattctgactggtgtgagatggtatctcattgcggttttgatttacatttttctgacttttagtgttgatgggcattttttcatgtttgttggctgcttgtctctcttttttttttcttccaactcttatttcaggttcaaggggtacatgtgcacgttcattacatgggtaaattgcatgttgtggggtttggtgtctagataattttgtcacctaggtaatcagcataatacctaataggcacattttcagtcctcacccttctcccaccctccaccctcaagtgggctctattgtctattttcttcgttatgtcctggtgtactcaatatttcacttgtacttatatgtgagaacttgtggtatttgggtttttgtttctgcattaatttgcttaggataatggtctctagctccatccatgttgctacaaaggacatgatctcattcttttttatggctgtttagtattctgtggtatatatgcaccccattttctttatccagtgcattgttgatgggcagctataataggttgattccatgtctttgctattgtgcatagtgctgcagtgaacatacatgtgcatttgtctttatggtagaatgatttatattcttttgggtatatacccagtaatgggattactgggccaattgacagctctgttgcaggttctttgagaaaccttcaaactactttctacaatggctgaactaatttgcagtcccaccagtggcgtataaacattcccttttctccacaatccacaatctcatgaacatctattattttttggtatgtcttctttttttttgagacagtctccctctgtcatccaggctggagtgaagtcctggctgactgcaacctccgcctcccaggttcaagcggttctcctgcctcgcctcctgagtagctgtgattacaggcgtgcgccatgaggcctggctaatttttgtatttttagtagagatggggtttcaccatgttgtccaggctggtcctgaactcctgacctcaagtgatctgcctgcctctgtctctcaaagtgccaggattactggtgtgaggcaccgcacctgacctgctttttggtatgtcttcttttgagaagtgtttgttcatgtcctttgcccattttttaatggggctgttttttgcttgttgaattgtttaaattccttatagattctggatattagacctctgctggatgcagagtttgtgaatactctctcccattccgtgggttttctgtttactctgttgatagtttcttttgctgtgtggaagttctttactttaattaggtcccacttgtcaatttttgttgttgttgttgcatttgcttttgggggcttagctaaaacttctttgcccaggttgatatcaagaaagttattttctgggttttcttctaagacgtttatagtttgaggtcttacacttaaatatttaatctaccctgagttaatttttgtatatggggaaaattaggagttcaatttcatttttctttatatggctagccagctatcccagcaccatttattgaatagggagttcttttcctattgcttgttgtcagtcttgtcaaagatcagatgattgaatgtgtggctttatttctgagttttctattctgctgtattgatctatgtgtttttataccagtaccatgctgttttggttactgtagccatatagtacagtttgaagtcaattagtgtaatgcttccagctttgttctttttgcttggtattgctttggctatttgggctctaaaattctatatgaattttagaatagttttttcctaattctttgaaaatgacattggtagtttgataggaatagcattgaatctgcagattgctttgggcagtgtgaccattttaattatattgattcttccaattcatgatcatggaataatgtttcttcatttatttgtgtcatctctgattttttcagcagtgttttgtagttgtccttatagagatctttcccctccttggtttgatgtattcttaggtattttatttactttgtggctattgtaaatgggattgtgttcttgatttgattctcagcctggatgttatggttgtatagaaatgctactgatttttatacattgattttttttaaaatcctgaaacttttctaaaactgtttattagccctaggaggcttttggcagagtcttcagggttttgtaggtatgaaatcatattgtcagtgaagagagatagtttgacttcttcttttcctatttggatgcctttttatttattttttatttttttgcctgattgctgtggctaggatttccagtagtatgttgaatagtagtggcgagattaggcacctttttcttgttccagttctcaaggggaattgtttcagctcatactcattcagtatgacattggctgtgggtttgtcatagcttttattattttgaagtatattcctttggtgcctactctgttgagggtttttttaatcacaaagggaagttggattttattgaaagctttttctgcatctattatgatcatattttttgcttttaattctgtttatgttgtgaatcacattgattgatttgcatatgttgagctagccttgcatctcaggaatgaagcctacttgatcatggtgtattaaatttttgatatgctgctggattcagtttgctagtattttgttgaggatttttacacctatgtttatcagggatattggcctgaagtttgctacgtttattatgtctctgctagattctggtatcaggtaatgctggcttcatagaatgagttatggaggagtccctcttcctcaattttctgaaatagttttagtaggattggtaccagttcttctttgtatgtctggtagaatttggctgtgaatccatctggtctaggctttttttttttttttttttttttggttggttggtagggtttttaaaattattattattactgatttaatttcagaactcagtattggtctactcagggtttcagtctcttcctgattcaatcttgggagactgtgtgtttccaggaatttatccactttctctagatcttctaattagtatgcatagagttgttcaaagtagtctctgaggatctttcgtttttctgtgggatcagttgtaatgccatctttgttatttgtttactaatttgatctctctcttttttgttaatttagctagcagtctatcagtcttgttgattctttcaaagaaccagctgttggttttattgatctttcgtatggatttttatgtctcaatttcattcagtttttctctaattttagttatttctttttttctgctagctttgagggtgtgttttttctgttagttgtaaagttagattgttaatttgagatatttctaacttcttgatgagggaatttcgtgttataagctttcctctcaatgctgttttagctgcatcctagaggtttttggaagttatgtttctattttcattattatcatttttttatttctgccttaattttgatgttcacccaggacttattcaggagcaagttgtgtaatttccatgtatttgtgtaattttgagagatcttgttggtgttgatttctgtttttattgcactgtggtccaagagtgtgcttgatatgattttgaattttttgaatttattgatacttgctttatgatcaaacatatggttgatcttagaatgtattccatgtggagatgagaagaatatatattctgtggttattgggtagagtgttctatagatgtctattaggtctaattggtctagtgtcgaatctaagtctagaatttctttattagttttctgcctcaatgatctttctaatgctgtcagtggggcattgaagtccccctctatttttgtttagctgtctgagtcttttcataggtcaagaagaacttgttttatgaatctcggtgctccagtgttgggtgggtatatatttaggatagttaagtcttcttgttgatgtgtaccctttatcattatgtaatgcccttctttgttcttctttgttattgttttgaagtctgttctgtctgatataagaatagtaactcctgcttgtttttattttccatttgcatgctagatctttctttatctctttacttggagcctgtggatttcattacatgtgaaatgaatctcttaacagcagacggttgagtcctgtttttatattcagcttcccactctgtgtcttttacatgggatgttcagctcatttacattcacggttagtattgatatgtgagattttgatcctgtcatcatattgttgcctggttttcatgtaagacttcattgtatagttgctttatagtgtatgtaggcgccatgcttaagggtgttttgtggtaacaggtgtcattctcttgattccatgtttagcactcccttataggcctcttataaggcttctctagttgaaatggattccctcagcctttgcttatctgagaaggattttatttttccttagtttatgaagcttagtttggtgggatatgaaattcttggttggaatttcttttctttaaggatgctgatagtaggtcttcactctcttctggcttgtaaggtttctgcttggaggttccctgctagcctgatagggttctgtctgtacatgacctgacccttctctctagctgcctttacaatttttgtcttttacattgactttggtgaatctgatgtctgtgtgcctcggggatggtaatcttgtatggtatctagctgagcttctctgtatttcttgaatttacatgtcaacgtgagattagggaaattttcgtggactgtatcctcaaaaatattttccaagttgcttactctctttttttctcactcaggaatgccagtgagtcatagatttgatctctttacatgcgctcatatttcttgaatattttgttcattttttaaaattcttttttcttggtgtctgactgagttgattcaaagaactggtcttcgagttctgggattctttcctcagtgtggtctgttccactgttaatacttccaattattccaattatgaaattcttgtagtgaatttttcagctctagaatttcagtttggttctttctgaaaatggctattttgtctttcagctcttggatcattttactggattccttggttgaggtttcaactttctgctgaatctagatgagcttccttgccatctagattctgaattttatatctgtcatttcagactggttaagaaccattgttggggagctagaggactcatttgtagttaagtggacactctggctttttgaactgccagaattcttgcactgattttttttctcatctgggaagtttggtgtttctttatctgtgatgcaggttgagtatagtcagttggcgtcatttctgggtattttcagagggtcaggactctgtacagggtctttgtggctgaattcttgcccctggtttcatggagttaggggggcatattaccaaaatatttttggtggtgtacttcaggctgtgatctggtagatggcacttaagagtaatgatcagtagctaggcttttattcatctgtgtgtcttctttgtatttcctcatgttgcagtcatgccctctgtcaccagtacgttggggagagagatgacctttccaccaggtttgcttctgggccttgggggagccccctctgatcactgttaccatgcctgcctttcttttgctaggtgttctgggccatgaggctctcttgggcagaaaccatggcagggagataggccacaccctttctatattgaccttgcagagggatgcatgccctgcttttatgccaacccagaaacccacacatctcaccccctcagtgctctgtgagtatgggctcctcctctgctccagtgccagccacataactcgacttggcactcccgagctgtccaccacagccctggggtgccgggactaacttggggctcatctgctggaccctcagagttgggttttggatattttgggggatctgaagtgctcccaggctgctggaaatgtactcaagaggagcagagcatccaggctggacaggagaggctgcactgcacacatgctcttgcagtggggggtcagggaggggccctggaaggagatggcaggcaagtggtcctgtagcacagatgtgcccccatgctggccctactttctcctgcctcagcggtcagctgggttagagcttcttggagggagatggggagccctgggagatgggtgtctatggctgtgctctgctggcctctcccacgcacagaggtccttggctccatgctggctgaagccctgattctgtctactccctgggcatatccctttgccagctcaaatatccatggtggatgtgggttcccctgtagctaggattccagaggtccacagtgatagtgtgcagtcccacagtctcttcattaaccctctcccgtggagctgttcagggctgggaagtagccctaggctttgggtagctcacacagggttcccagcttcctgtctcatcagtctcagtatctctgtcacatctccatctactttcagtgtttcttctctgaagatccgttcaaattgtgttggtttacttgaaattttggtctctcttgtggggagcagtgcttcttggcttcatctagtcagccatcttgtcctttttcaaactttttttaaaatttgggtcagtcctctgaaaccctgccactgctttatcagctaagtttatggaatattctaaatcttttgttgtcatttcaacagtgttcacagcttcttcgccaggagtagtttccatctcaagaaaaaaagtgttatccataagatagatccataactctttttggtaatccataagaaataaatgcttttctctcttttgttcaagttttatggtgagattgcaacaattcaatcgtatcttcaggctctacttctcattctagttcttttgctgtttttcccgcatctgcagttacttccttcactggagtcttaaactcctcaaagtaatgcatgacagctggaatcttcttcactcctgtgcatgttgctattttgaccttttccagcgaatcaggaatgttctgaatagcatctagaatggtgaatccttcccagaaagttttcaatttgctgtacccagatccatcagacgaatccgtatctgtggcacttacagcctcttgaattgtgtttcttaagtaataagacttgaaagttgaaattaatcctcgatctatgggctacagaatgggtcttgtgttagcagtcatgaaactgctattaatcccctggtacatctctattagagctcttggttgactgggtacattgtcaataagcaatactattttgaaatgaatctttcttctgagcagtaagtctcaacactggacttaaaatattcagtgaaccacactgtaaccagaggtgctgtgatctaggttttgttgttctatttccagtgcacaggcagagtagattagcataattcttaggagcctcggatttttggaatgacaaatgagcattggtttcaacttaaagtcaccagctgcattagcccattttaaaaaaagtcagcctgtcttttgtagctttgtagccaggcactgacttttcctctcaagctatgaaaatctgagatggcatcttcttccaatagaaggctgttttgtttgcatgaaaactctgttgtttagtgtagccaccttcattaatgatcttatctagattttctggataactttctgccggttttatatcagtacttcctgcttcaccttgcacttctataatatgttatggaatggaacggcttctttccttaaacctcatgaagcaacctttgctagctccctacatttcttctgcagcttcctcacctctctcagccttcatagaattgaagacagttatggacttgctctgaattaggctttggtttaaggtagtgttgtggctggtttcatcctctgtcagatcaccaaaactctccatatcagcaatacggctgtttcactttgtattatttatttgttcactggagtagcagatttaatttcccttaagaacttttcatttgcattcacagcttggctaactgtttggtgcaggaagcctagctttcagcctatcttggcttccaacatactttcctcactaagcttaatttaaagtaagagacatgcaactcttcctttaacgtgaacacctagaggccactgtagggttattaattggcctgatttcaatattgttgtgtctcaaggaataggaaggcctgaagagagggagagagatgaaggggaatggccagtttgtaaagcagtcagaactcgcacaacatttatcaattaagtttactgtcttataaggtgtgtttgatagtgcccctgaacaattacaagattacatctgtattagtccattttcacactgctgataaagacatacctgagactgggcagtttacaaaagaaagaggtttattggacttacagttccatgtggctggggaagcctcacaatcatggtggaaggcaaggaggagcaagtcatgtcttacatggatggcaggcaggcaaaaagagaacggggatcaagtgaaatgggtttccccttatcaaaccatcagatcttattcactaccatgagaacagtataggagaaaccaccctcatgattcaattatttccacctggccctgcccttgatacctggggatgattacaattcaaggtgagatttgggtggggacacagagccaaaccatatcaacatcaaagatcactgatcttaaatcaccataacagataaaacaatgaaaaatttgaaatattgtgaaaattaccagaatgtaacaaaaacacatgaagttggaaacatggtgccagtagagttgctcagttcagtgttgccacaaaccttcaatttgttaaaataccagagaggctggggtgggaagatcgcttgaggttaggagtttaagaccagcctgagcaacatgaagaaaccctggtgtctttaaaaaaaaaattgttcaatgaatcaatgaatgaacggcagtttcagatattttccactcttctcaaacatcttacatgtcatttctatcttgatcctcagcaaataactatttccaagtcaatggtaagaatagaaatctgagatggaaaatttcttcctcatttaccatcaaaactacaaatattctcccatgattattttcctctgttgcttctgctctgaatgatatgactttttttcttttcctaaaaccctaggttccatccacattcaccttagaaggattttgatttttctctgattctatctttctcccaaattctgtatgtagcctagtgattatgagcatggactttacaatcaggctttgtgtctgatttgactcaaatttgtgtctgttactatgaaatcttgggcaaattatgtatctctcagcctcagttttcttgtgtgttgaagataataatacctaggtcatggagttgtcgtgaagatcaaaagtgatatctttaaagtgctaagcatagcaggtacacagtaagcatgcaaaataaaggtccttgcattatttttacctccctttctagtggctcctaaccttattaagagtctcttgtcttaagaaattgttctactacttcagtatttagcactctctctctctcttcaccatcacagctattctccactttttatctcctatttattttggctctcacatcagcctggcttcccaagcatttcaaattttatttttaatcttatttcttttccacccctttctctccaaatttgctctgcttccaataagttcatctatcatggctcaaatcagaaaaatagcagatgcccttgttcttttgccctctctacatttaatcatcaaacagagttctgataattctgctgcctaaatagttcctaaatttttctacatctcttctttgggtgctaccatttcagtccaaggcactatcatctcacacagtattgtgacaatagccttctactattctcccctttgccacactattccatactccacactatagatagagtgataacaagaaatgttatttccctttataaacattctaatgagttttcttgctcttagggcagagctcttcttgatcaggtcttatttatctcttctttcagctctatcttataccactattaccctgtgcatgccctagctctgatgagtttctttcagtttcattcagatctcttatttcagcttttccacatagtgttcctctgctgccttcctgatccttcttggggatcattgctacttggcctctggtttcaacctaaactttacttccttgagtgaccttcgcttaggctaggtacttctgtggtctgttctttattaccgtatcatcatggtgctcatgacattttacagttccttatctccccccaagattccagaaggcaggagccatgtctttttcattctctaccacaatgcctggcctatagtagacacccattaaaattttgttaaatgttgttaaataattaaagcaagagaaaaatcatcctatataacatgttagggtttagaactacatatggtattcctgtatttaactttgaatatttctttaaacataagtaaatgtggaaaataataatgctgcttttcagcacatgctcttatttttctatcttcacacattccctaattttaaaatctctttatgtttgtttttattccagactacaaacatcaaatcttttttttttctatttggatgcttttaagtataaagtgtcacttaatatcagcacttctgccaactcttattcatttttccagctgtatttggacaacatttacatagataattttgtgaaattttcaactagaagttgagttgagataaatcatgcagttttcaattcagtgtatcctgaaagataacgaaactcactgagctgcctggttttccaacaagctacatagaaagcatgaggagggcagaaggctatggcttccactgttttgaccacttcacagcccttcccgcagactgcttggagatggctcaagtggaacctgttgataaattaatgatcctctttttcccagtcaccattgagccaaagtaggctatggggctgaatcatcccagacagggatgaatgaatgttctgaaaagctgaaacataaactgtcagttaagatgcattttcttcaagtttatttgtgacagatgatggaaggtagttgatattgactgagtttgattgtttcttaggaacaatcacagtcatttgattgttgttcctaagaaagtagtctttttaaaaaaacaaaatctgagatacaaatgaatcactatatgttaattttccttgcccttcttaggtgaccactgactatattttaccagttgttaatgtagctttgggggggattttgttcatttttttggtgcaccttggataaaaaataattggaaatatttctcattttgcaattactgacttttcatactactggaatacaggatttgtcagagttcttatctgacccagaatagattagacacgttttaagatcagtaagaatcatctgctttttttttttttggtggtggggtgggaacatggtcttgctctattacccaggttggagtgcagtggtacactcacagcttactgcagcctctacctcctgggctcaagcaatcctcctacttcaggctcctgagtagctgggactacaggtgcttgccaccatgcccagttaattttgtattttgtggagtcagagtctcactgtgtttccaaggctggtctcgaactcttgggctcaagtgatcctcatgccttggcctcccaaagtacaagtattgcaaatgtgagccattgtgcccagcctatttgtcttcttaagcctacaataagaatgttgaaaagatagtttatttatataaccccatttgatacaaaattcacatcaaatagagttaattaaataatggatgtcccttgttcatcatttcaggcagatacaaataccacttttagcaaaaaaggtaaatctcttgttttaagttacccagacgaagattatatagaaagttagggtaatgacattcccaaggcaaaagttcttcagggaaaaatagtaagccatttcagtttctcaatttctggagggcttatctgaagggattgggatgtctaatattgcaaattaggcaaattgtgcacatttatcaccatgcaccttggatttcaagcagaaataagaggaggatttgactgaagggaattaactttggtcttccaaacttaaatatataccagatgtgtactgtggaaggatcttcctggttacagtataacctctggttcttttggactcttgctaacttaatttacccagttcttttcccgtatagaaattagactgtggattgtttctgtggattatactcatggatttctgtggattatactcatggattttattgttttatcttatttacagattctgacttttttcttttctttctctttttaaaaataacttaagatgtttgtttggaagattggcaggatgttcgttttacagtgttcaaaaatgagttgtttgtgttttatgtatatgcccaaatactctgtgaaaacataaactgataaaaggaaaattaattcctatctttataaagtgaagaattgtttttttttaacaaattaacatatcctgagttacattcttgagtgagatatgagaatttaaacatataacatgaatacccccagttttgagtgctaatatgcaaggaaaggctttcctcattactgttttacaacttttatgctccataaggttgattctcagtgctagttctctttcagagagaagattcagtaaaaaacactgtataccagtccttaataacttaaatgcaaatactggcatatatccagaagctaaggttcaattaggtgtagttgtttcatcttacaaaattattttaccagcaagaaatcttggcagttatattgatgatttctcatgaaagaggcaaatgggacgataaagaggcctgaagactattttttaatactaattttctaattcctcatttttttaaatgtcagaagccaggccttagaaatcaagcacctgagttttcctctgattttctaatcattactgtggttattctagttgtctcttatctgttcggaagtcataatgtgtaatgatggcataagtgaatgttaaagaagtggaaatttgatatgatctagatggcagtttattggtttagtttcaaagacaattttacctggaaaataaataagaaagcttatcaagcttttccctgttatccgtggtttatctgttccttgtgtttcatcttgaccaccactggtcttccagaaatcgctaaaatctctcctgcctatgtcatttctttttccttacaagatcaaagcttttatgagcattatttattgtagcctcacaatattctagagagcaaagtagaggttatgtgtctccatctttatttttaaagccaagtgaggaacagataaatctcttcgctaacgttacaaaatgaagcagtggtagaggcagaaataaactcctgaggcagaaacatctcctaattctggcccttacgtctaagatgcagtagactgtttggcctttctctaaacaggcctttgacatttagggtatgtggaaagtatgtgctcccgtcagagtttcgctgtttagttattctttgcctgttaaagtaatgactagaagactggagaaagcagaaagaacatccaagtcttatttcagcctctgcgtttagtacatgtgagctttggacagagagtgcctttatttcctgggaattaacttttctctctttatacttagaaggaatttttctttggggcactgctgatattgagaatttgggggaaattattatttttttcattcaagttttatgtgtgaaaacatatattccaatactagaccacactgagaggatttggggagatgactgcaaagttttacattttaaaatgtaggtttagtgccttttttttaaacctgaaagtcattgcaaaaatcgattaaattttaaaattgacttaattcatcaatctatattgctataaagttttttaaaaactaacaacttgtttgccctatgacaaatatttttaaaaataattttcaactgtatttttatttcaatatttatcaccctgtggttattttattttatgattttagctgtttcacttttttttttctttagtatccataattgctgattgggaatttttaacacaagacaggaattgttaccctccctccccccctcccttccttccttccttcctccctcccttcctttatcctttctcctttctcctttccctcccctcccctcccctcccctaccctcccctaccctaccctccccccctccccccctcccctcccctcccctcccctcccctcccctctcctctcctcccctttcccctcccctcctctcctctcttcttttctttttttcctttctttgtcttgctctgtcaccaggttggggtgcagtggcacgctctcgctcactgcaacctccgcctcctgggttcaagcaattcttgtgcctcagcctcccgagtagctgggattacaggcacgtgccgccacacccagctaatttttatatttttagtagagacagggttttaccacgttggccaggatggtctcaatcttctgacctcgtgatctgcctgccttggcctcccaaagtgctggaattacaggtgtgagccaccgtgcctggctgcctctttctttttttaaagggctgcttttcatattgacctacatgactaaacctgagttataattcagaagaaacagttgaactattgtgtgccatcttgtcataaagcgcaggttagcacaaatgtcttgccaatgtcttaaatgttgcaatttttgtaaaatcttccgtgtgcctccaacatctccagttggtgaacagatctcactgtatttatccctgttgtgttcttccacatgtttgttttgcagcataataacacttgacagttgtaaatttttccgtatgttctgttttgtagagataaacaatgtactttctgtgtatttccctgagctttgaagacttaacttttgaaataaacaattccataggattttataggaggctttggtacgttattcacacaaactattctccttgaaagggaaggtagttgaatgttcatccttttgatataaactggttaactgaacttttccaagggatcaagcacaacttaactgcttttagctttgcaaccagggcaatgcagaccagaccagtgtttgaaagtctttaaaagtattatttgacatcataaatgaccattctgtggaataagctctctaattctctgagtggtttacttcagttagagggattagtgaattagctttggatttgcttataatttcctcttttatcttttacaaattaaaaagttggtatcggcatgtaatgatagcatctaaaacatttatgttgtggtggttgtatcatagaaaacattctttaggattcaattataagcagcctccttccattagcatgtcaagtttttctgagcagttttatttgtgaaaaatcagtacagatatttttattcatagcttgatatcctttttttttttcttactcaaatgaatatctgtttcctacctttctccctcaagatgcagtggtgcttttattatttgattttgtaaagcctgaagggcagaaatatttcttaagttttccattgttaactacaaacttggctatataaaatatacaaatcataatatctgtatggttatttttattgtcatttctttaacacacaaaatttatcacatttatgcaagaattttttaacttagaaaactcaaaattgatatgtaaattgggtggtagcaacaatgtgtgggatgtggtacgtggccaatgatgtgttggaggcagcccccaccagctcccaagatctagtgattaaattttcagaaattttgtgagccagttatcagtaaaaattaaactatataaacttacaattaaataaattatttaaaaacaaagataatactcaaaactcagtaattatgttttactacattttattatctatgctcttgaggttatttgtgtctcttgtatctgtattggaaatactatataatggtgtatactattgtatatctcttcacaacttcatgttcattaacatcatgttgatagcttcaaattagccatggtagaagtattaacaccatgaaaatcagcaaacacaaccaatcaggggctgatttattgttttgctgattgtctagacttaagaaagtgatggaaaaaatgttaataacacatattaaaaagtgtgttatatctggccgggtgcggtggctcatgctgtaatcccagcactttgggaggctgaggcaggcagatcacaaggtcaggagatcgagaaccatcctggccaacatggtgaaaccccatctgtactaaaaataaaaaatttgctgggtgtggtggcgcatgcctgtaatcccagctactcaggaggctgaggcaggagaatcgcttgaacctgagaggcgaaggttgctgtgagccattatggcgccactgcactccagcctggtgacagagcgagacttcattccaaaaaaaaaaaaaaaaaaaaagtgtgttatatatctataaccattatactatgaatagcaccaaaaacttgagaaaatattctttcaggacagtatttgaaaactattatctaattcattggagaagtggttcacgtcacagacaagtgaatgactgaagtttgggcatatgcctgtgtttaccttttatttattaactaaacaaacccatcagccttctacagcaaaattgtaagaatgagatgttgcttcaagtacatcagacattagatgctacatacatcaggaagccttttatagttctcttttgaaaactgtactactcataatatgctgtttcctactcacctatgaccctagacttcctgtttgctctaatggttgctgttaaaggtatgacaaattcagctgtaaagtgtttagttatccacatccatctctttgaccacaaattacctaagaatggtgttacactacttttgtgggaaaagagaaacatcataatactggatacataaaatcatagcttttcctttccttgggggaataattctgttatctacccactgttgggaggtagtttagattggttaatgtaagtatcaagggggaaaatggctgtattcaacagaatttgtttcccttaatcttatggatagcttcacaattcatgatagcatagttatgcaacatatatgaataaggatgaagatgagtatcatttgattaaagtatagcttctaagacttaaatgaccagaaagaattgaactgcgtttaaactctaccacacacctgctccttatagtaggataatctggtcaagcccttgacttcaaggagcttgctaaccctggtattaattgatgtttcccaaactttagtcaactgagtatcatcctcaccatatttgttctatctctgtaccgcttgtacttttatttactttgtaattttttaaattaactttttcttttaaacttagctttatcctaagtgataatactcatgaaatcttgggtttaaggtaatagttatgttttttctagtatctattaaaatattgcctaacaattacaattttagaaagacttttctttttaccaccaatggtatgtctattttgctttgggaactattgtgctagtgatgataatagctaggcattaagttaaattgtcttgtttgttcctcacatcaatgtgataagcgttgctctctctattcagtaaatgaagacaccaaaaaatcagagaagttcaacaacttgtccaggtcatgaggcaagccagaacttacctgggtaaggtccatatgagcccttggtcctcacagcattcttagagaatcacccgggagctttttgaaaatgcaaaatctctggcctcactccagacctcctgaatcagaatctgcatttgaacaagatcctccaggtgattctcatgcacattaaagtttgagaagcactgagcttaacatttgggtattctgcctcccgtaggagaagatgggtgactgggtcattagtttggttgttctgtgatctggtttggctctgtgtgcccacctaaatctcatgttgaactataattcccagtgttgtgggagggacctggtgggaagtgattggatcatgggggtgaatttcccttttgctgttcttgtgatagtgagtgagttctcatgagatctggttatttaaaagtgtatagccctttccgcctttgctctctctcctgttctgccatgtgaagatgtgcaggcatccccttcgcctcctgccacagttgtaagtttcctgaggcttcctcagccatgcttccttaacagcctgtggaaccgtgagccaactaaacctctttctttataaattacccagtctcaggtagttctttatagcagtgtgagaatgcactaatacagtctccttgtctctctgtagtgttattttcttcatgccatgctattctgagctgcaactatttttgagccatgtgatattgatgctaaggtagaagataatattctcaatccttttgattattttttctctcctaaagtcataatttgtccactttccttccttccttaattggagtaccaggactagcctgagggtcaacatttatactctcttttttttttttaatccttgttttcttccccagcagccacaggtcaagttcttgccccttctaatggtctggtcatttcttttcctgtctgcctgaaactggcagaccctgagaactgtctacaggcctatagctaattctcagtttttcctggatagttttaatagtatggatgtcatcctgactcttagcttcttttccttctcccaccagttctctgccattcagctattttaccgctgcttttctttttactaagatgtgcctatctctgcatccatgaggcctctgtttccattctaccttgcagccatctgcttctcacttttgctgttgttgctcgtaattgtaagtttaatataagcagcagcctcaggagaccccatgaaagcaatcttctggaaacagtcaaagtgctgggaatttgatggttggatctgggaatatcaataatgtctacaactgatgaatgtagctggctatagattctgaagtactccagtgcgtcatcagcatttcatgagtatactgtctgtgtgattttttcacagagtttccctttgaattttatgtctgcagagtttctaaacactgcacctggctcatacagttacaagccttctttctcagtatttatatagttgtttattcagtctccaagatgattagttatttgagatgagtagaagttgcatctattcatgtaatcagagcttgttttcttgctcactggtggccagatacaggtcataatagtattttattttcttaactttgaatagcgttaaaggggagtggactcatttgaattacaggaggtactgaaagaaaactatattattcattacattttgtaaagcaaggaacaaagaggaatagttgtttcctaccatggtaatttcagactctgaaagatctgtttataagccaaatgtagacatacctatccctaacccagatttttttatggtcttcaattttgtaattatttagaattgaagggttttttttcctttctgccacatatttttgtacacaccctttctccctcccctttcccatgcttttgtttccttgagaaaaggagcgtccctcttagagcatagaataaacattctttgtgaagtgtgacttatttatgcttcaggggttgtcagtgtatacacaatagagaaggtgatggaggctccgaggcatgccaagtcagcactttgtgcatgttgaggccaaagagcatgttaagcaggcttaaaaaattttaacaagtcagaacattttacaatttccatatttatcaaacatgtcaggggatgggatcacaaagccttccagggattaactgcctctctgacttgaactgttttattaagatggaagaagccaagttctcaacaccctgtgatttgctctaataaccacaagaatcagaatgtaggtgatccttgctgaatgaaagcaatcctaaggctaaatgctctttgaatggggaaaaaaaaaaactctctcaacagatgaactatgtgtgaaactttctaacagagcttaggagtttgaagtttatttacctagagcttcagttttattaattctctggttggtggttcttgacctttgacacccaaggacttagactgtgaagcctaaatagaaggcattcagaaacctgaagacattctcaaagaggggtggccattggcttttttggggttggcaaaacatcctagagttattatttgtttttacatgtttggggtttggcagatcctaagatgcattttgccaagcactttcctttgaattttagtacaggaatatcttgggtggaatttaattcgtgattcatttgcattatactgatcagaatgccattttggaaaagatatctgatgactgagaaatattaggagatttacaatttttaagtaccaactttttcttagatgggaagaaaaatggaattcaagccccaattattttcagtgagatttggaacttggaatcttgaactaagtagtagtttccaaatgtgtctgtattactttctctacaaaagcgaaccagactacttccctggcttgatctgcaaatctttagaaaagttacagagctgatatgcaaccttgggctggtatttaatttgaaaactaatgttaaaaaggctttctgataagtaagtagggagagtaaccctcttctgaagaaatagattggaattaaaaaacaaactaagactaagcataagtgagatcttgggtttgaaagccaaattgccaaagatggcaaaacccctagagggctaaagttatgtgaagtgccatgaggtagcttttccattactgtttgcagaaaaggttgtaaaagaaggaactgtgctgaaactttacaaatgagtaccaaaccataaactttttaaagaacagggaaagcacatagctaaatatggtacccaacattattgcccatcaggctgcaacaaagcatgatgacaaaaacaggttttttcttgtctactgtcagcttcctattgtttgtaactggcccaggaaaagcagtgccagcaactcaaatgactgctctcactgtcttcttgagaaaacagcagtgcaagcaagcgtccatcaggaaaagaaagaagcattttaaacaaatttacatggatatctttaggttcaaattattttgaaaccaaaggatatgaagtgttgggaattctagttctgaattctataaatcagtgtaaggagaaggacagtgtgatagagactcttttatttgcttcaaatagtggggtgaataagttataagagtatcactgggccagtgttgatgattttcttttctctcttgttccccatgttcttcaaactgcttaaaagtcaaaacacaagatgtattttgagttcttgaccttatcctggccctgacttagtttgtcagaatattaggttgtctacagagatccaccctggtttccatctaaatttttttagattttggtcaactttctatatctttatttaaataactgtaagtattcctttcagtataataaaaatttatgtttttcttcttcttaaactttggtccttgtccttgttactttaaaacagagaacttagtaaagataactttttcttttatttctcatttttctctttctctctctatacccctctttgcttgcccccgcccccaaccttgtctctttcttactggctataatctaattagtgaatgcttatcaatgaccaatgagaacattgtcacattttacattttgcttgttactgaactgtaatctctgttgcagaaagcaggatttttgtgaggttgaaaggaaagtgtggcatcccatgagtctgatgctattacgttttagaaaattgaaatgactggccaggcgtggtggctcacgcctgtaatcccagcactttgggaggccaaggcgggtggatcacctgaggtcaggagtttgagaccagcctcatcatggagaaacctcgtctctactaaaaatacaaaattagccaggtgtggtggtgcatgcctgtaatcccagctactcgggaggctgaggcaggagtattgcttgaacctgggaggcagaggttgtagtgagccaagatcgcgccattgcactccagcctgggcaacaagagcgaaactctgtctcaaaaaaaaaaaaaaaaaaaaaaaaaaagaaaagaaaattgaaatgacttactacattattgagagcatatcttagctttggataataaagaatatagataaacattttaagagcagctcttgtttcatacttcttatctcacacacagtgccttttacacaataagggctgaataaaattgttacccattttagttcagttaatttttgaatgtgagggcagatcatttaattccgtatcttaatatataatccaggactggtgaataatacttcctgccaaaaatccattaaccttacaggaaacaaaacccagtgaggatcatagaagtaaaaataacttaatttagatttcataagttgttatttttttagagaaaagcataaaatgttctgtacctgcacatttgaaaataaaatcaagaagcaaaacattctcatgagtaagaatatgaaacaataatttgaaaataccaaaactcagtatttattactgttctacagtagatattagtgactagggaaaggacaaggtggctatggggtagtagaaaagggagccagatatgcaaacctttggggatgatgatttaactgcttcatgacagttaagaaaagatttattttttttagggtttaaaattactatatttaaaaatatataaatatttgagttttttcctcaagtctggaagcagaagcattcctcagtctttctctccttcgacatggcagcaacagcaacagcagcagcagccaccgctgctgccaccgccctggctccacctagggaaattgcagaagaccctatctcattctagtgaggaaggttctatgaagtagatagttcatcttgtagactttttagaccattgctgtaaaagacttttatattttttattttttgagacaaggtctcactctgtcacccaggctggagtgcagtggcacaatcatggctcactgcagccttgacctttcgggctcaagcaatcctctcacttcagcctcccaagtagctgggactacatgcacatgccactctgtcagctaattctttttgtagagacaaagtctgactttgttgcccaagctgatcttgaactcctgggcttaagtgatcctcctgccttggtctccggaagttctgggattatagatgtgagccaccatgcttggccctaaaacttttagagccatcttcaaatgttgtgattgtctagctggacatggtggctcatgcctgcaatcccagcactttgggaggccgaggctggtggattgcttgaacccaggaattggaggccagcctgggcaacatggtgaaaccctgtctctgcaaaaaatttaaaatagttggggatggtggcgcagcctatagtcccaactactctggaggctgagatgggaggatcgctcgagcccagcaggctgaggctgcagtgagctgtgatcatgccactgcactccaacctgggcgacagagtgagaccctgtctcaaaaccaccccacctcccaaaaatgctgtggttttctgtataaaatgggactaactattgacacttctttataaatcagataaaattatattgaagtccagtttaagctcattggatgaaggatattgcatttcagtgtagtgtttataagaagtctactttaaaaatatatttttaaaaatgattgtaggatcctgtttttttgttttgttttgttttttgctttttgtttttttttttattctaacatttcctatgttcccacaatattaagagaccatttcacatcacagtctcactgctggagacttttactataatatatatttatctaaataaggttttatttatttgtagctgcataaataaggtttctacttagaaggaagcctcttgagagcctatatttgttttttgtacattttaaacttctgttctttaacaccagaaagcaaaagaatgaatagcaggtgaacaactctaaaaaagtagagataacaagtagaaggaaaataatgtttatgagaagaaaagtggtcttgttattgagggagccaagctgctaaacagagtgggaagagaacatttgttcagtctctacttgctggggcaataaagccttctatctgcccctgttctgtgtaaaatcctgttaatattagatattttaaatttatgatgataaaagaaatgtgcaccttttgtgggaaattcgaaaagaacgaggaaaaataaagaagggcaaccacctctaacaccaccacccagaaataatgacagctttcaagtgtgtttctttctaatcttttctgtgtaatttaacataattgaaattatacggaataaacagtttcttggcctgctattgttttcatggactacaattttgtactctcattttgagtaattataatgtgccaggcactgtgttaaacattttacaaatattaatattatctcttctcagcactatgagggtgggtatagttataccttgagcttatatttcagggaatgtctacaaatgagtctactgctttaagtaggcttcactgtatgaagaaaatgcagacagcagaaaagaaagctagacgtttttcatggatgcttctttctttctttttcttttttttaggttttattttggagggaaggaagaagaacctgtcttctttaaaaaatgaaatatttttaaccgaaatgttatctagtgtttagtgtgtcaacaagttctaaattgtggaaaagtcttatcagaagaaaggctgctttgaaaacgatatggaaatatttgttgggtgttcactccttcaacgtctaaatgaaatacactggggagtaactgaattttacagtatttagatagctacatagtgagcaatcaaaacattctttaagtatttaataagaggttaagatcggcccgcctaaagcttatataatagaactgagtcagtgatgatgagcattttttcatgtgtctgttggctgcataaatgtcttcttttgagaaatgtctgttcatatccttcgcccactttttgatggggttgtttgttttttccttgtaaatttgtttgagttctttgtagattgtggatattagccctttgtcagatgagtagattgcaaaaattttctcccgttctctaggttgcctgttcactctgatagtagtttcttttgctgtgcagaagctctttagtttaattagatcccatttgtcaattttggcttttgttgccattgcttttggtgttttagacatgaagtccttgcccatgcctatgtcctgaatggtattgcctaggttttcttctagggtttttatggttttaggtctaacatttaagtctttaatccatcttgaattaatttttgtgtaaggcaatcagagaaatgcaaatcaaaaccacagtgaaatatcatctcacaccagttagaatggcaatcattaaaaagtcaggaaacaacaggtgctggagaggatgtggagaaataggaacacttttacactgttgatgtgattgtaaactagttcaaccattgtggaagttggtgtggtgattcctcagggatctagaactagaaataccatttgacccagccatcccattactgggtatatacccaaaggaatataaatcattctgctataaagacacatgcacagatatgtttattgcggtactattcacaatagcaaagacttggaaccaacccaaatgtccaacaatgatagactggattgagaaaatgtggcacatttacatcatggaatactatgcagccataaaaaatgatgagttcatgtcctttgtagggacatggatgaagctggaaaccatcattctcagcagactaccgcaaggacaaaaaaccaaacactgcatgttctcactcacaggtgggaattgaacaatgagaacacttggaccaggaaggggaacatcacacactggggcctgttgtggggtggggggagcggggagggatagcattaagagatatacctaatgtaaatgacgagttaatgggtgtagcacaccaacatggcacatgtatacatatgtaacaaacctgcacattgtgcacatgtaccctagaacttaaagtataataaaatatatatacatatgtataaagtaatagaaatgagtccaggaatcagtaacttggatactttgttagctgttcgagaccctgggccaggccaacacttcctaaaggtgccagagcacacagagagcatagagattgcactgattgcaaacctatccaagggccccagctcctctgctaacacccaaggcctctccacctgtttttctccgagttgctcgtcaccctgtcctttaccttctagattccccagggctcctggtctccttggaattaagactttgagattttgttgtaagagtttccaaacaattcttcacaatatctcttgggtttgtccttgtttatccaggcctttgttactcccacagcctccttgccagcctttttgatgcatcctttgctgctcactgccttaatacccatgccatctccaggtctgtatttctaaaacatttctcttgtgtcattcctctgctccaagaaggccttgaatgtcaagcctgtttttcagcttgtcttttgaggtcttctgtaatctggctgtacacaaccttacacttttatttccggctccaacgtaaagcttcctatgaagtccagtggtgtgaatttcaacttgtataccttgattgtatttttcacaggtctagaaaatccttactttacaatttatttaaatctttctaatcttaagttctattttttctatgaagtattccctgattcagtctacctaggtcttttctttctctgtacttctcttacaggcagtatcataaagatgaagtcatgtttttatggaagccatttttccccaacgagattatagctgtgatggtaaagctggtacccttcaaaagcttattcctttcctttccctttccctttcttctgttttctcttttcttttttcttttcttttcttttctacctctgtcctcttccccatcacccccttgatattaacatcattgcactatatatccttttcctcccatcatctttcattttctcctgactcatcaatataccagcataacataggatgtatcattttttagtcgacaacaaaaagattttatttttttcttcatagcattgcataatatattttcatgtaatacagttttgaatcctacagaaaaatatgaagaaataaaagtacctgaagagccatcactgtgagtagtccaccatcaaaattttgataactgtctttttaggcatctctattcacacgcatgtgtgtgtgctcacacatcgacatgagtaccatactgctttctcatgaatatcttttttaaaatgcagattttttttggagaaggaagtttacctgccctcttctcttccccctctccccaccatctcttaacgcatttatgttaacaagctgtgtgtttttgcattcatcaaacccattttattatatgcaaatacattatatataatggtataaatggggagggggagtgtgttttgccaaaatgggatcaccttatatacagttatttggatcttgcctttttttttatttatttataattatatgttaagaaaatccttctaagaaaacattttatatccaactccaggagaaatattaaaaagggaaaaatttgattggatgagcagatattaaatatatatatatcaataagattttctctgtaccattaaataactaactttaaaaaataaagaataattgtcattcatagtagtgtcaaaaatctttaaaatgcctaagaataaactaaaagggaaagttaccagatttctagaatcctgattttcttaaaaactggataaaataatgttaaaatttatatagaaaaattaatatttgaaaagaaccaagaagttcatgaaaaagattatctacttcttaaatttaaataaaaacatatattgcctgttttcttggcactactaaattattctacaacatgacttaatgactgcagagtatttcaacatcggaatgtactctcatttattttactagtctacttttgaaatttaggttgtttgtttgttttcaacatatatatttttgctatataaatatgctgtagggaatagccttatggacaaattcttatatacaaccctggttgtttttataaaataaaaacctagaagtgaaattgctaggtgaattttcacatttttaaaacttttgccacaggagtgctcattattgcactttgctaataatagagtttgttaatctaatttttttttttttaagagtcaggatcttgctttgttgcccaggctggaatatagtataagcatgatcatagctcactgtaacctcagactcctgggctgaagcaatccttccccttcagcctcccaagtagctaggactacaggtgcacatgaccatgcctggctaatttttttcatgtaattttgtagagatggggtctcactgtattgtccaggctggtcttgaactcctggcctcaagcgattctcccatacgcatatatatcctcccacatatgtgtgtgtgtgtgtgtgtgtgtgtaaaatgcagtgtttttaggaaaaatataaagaggtcaacttactagctttcaaaactaagaagaaaagaagaacactcccttgaggtttaaggcattttgacatgtaaattgtacaccaatagataggcacattacatgtaataaccagaccatagactcttaattttgttgaacatgcccaaaagctctgtgtctctttatctcagtctgcttcagtcactagggcaatgaggacattaactatcacatcttgaagtaacttacaaacaacactttgacatttggagcattctataccagaaatctcttaaattacaatttgtttcttaggtctagcatgagtaacaccatcaaagtgtatttctttggcttctgctataatcaacaataatagtaataataactaacatttaatatatacaacaaatgctgtgtcaggcactgtgcactgtaactgaggtggtatatttacttttttttttttctttttttaactgatgaggaaacttacccgtaagagcatttaactaatttgccaagccagcaagtgaggatagagccctggagttggtcccattaccactataatcacttcctctagtcattctttccttactccaaagtttacttcatcatctctagccatttctagatacctttattcttttcttctcttgatgtcttcattttatctgtctcacttccatgacttcttcttcttcttcttctttttttttttggatgaggtctcactctgttgcccaggctggagtgcaatggtgccatcatagctcactgcaacctctgcctccgaggctccagcgatcctcccacctcagcctccagagtagctgggactatgggtgtgtgccaccatgcctggctatttttttgtgtttttttttttttcttttgtagagacaggtttcaccacgttggccagcctggtcttaaactcctgagctcaagcaatctgcctgccttgggctcccaaaatgctgagattacaaacgtgagccaccgtgtccggccaatttcttgtatggataccaaactgtgtcttatcctgcctcttttagttctatgtcttatcacccattagttttacaggtagccatatttatatttaacctacgcaaacttgatcttcatctgcagaaaaagggaatcaaatctactgctcatttcattggaaagaatatttatttatcttgatgtttaatcgagctgtgggctctgccttttaaatactgattagttctccaatagaacagttcttttgggaactgggaagcttttattttagacatttagggtatagttttgaattaaaggctatttttccataagcggttctgaaaggttaagttttgtacgaaagaatgggctctagaaatttactttggaacttagatcacttcattgggaatgcctaagtgaatctttgacataagttgtccaggtgtctttgctttattctttggaatgaaaaaatgtatgggtcaaacagaacccatctgtttggaatatctttagtatccagactctgacctccatgtttttggttgtgagaatgtcagcatagtacctggcttctagaaaatgctctataaatataaattgcctgggtgaataactgaattaatgagtgacttaatgatagagactgagaatgagaagatagaatggttgttctggaagtgattgcttctctccagctaagcctttaactctgggctgtaccatcagtagtccttgcatactgaagtcagacttttctggtcaagaagaaccttttaggttcttgataaaataccttttattcttaattttcctgtaagtacctgaatgtattatcttgaataactccaattcaggtccttagattcctcacgttacttgaaattctttgtttcctctaagagttcactgtatctcacaaatatcctgatataattctgttggtaaatattgatctcactttgctctgagatcaggctgatgtatatgtgtggtaggtaataatccctatttaggctgatacattgttcacatatgcacatattataatacacgcaaacatacagaaatacacactttttccctctgaatttttggaattgaagacatgatactcctttatccttaaatgtttccatgcatgtttcctgaaaacaaggacagtctcttatacaaacatgatgtaattatcaaaaccaggaaattaacattgatacaatactattatctagtctgcagactgtatttgggtttttccagttgttccagtaatggcctttataacaagttaaaatccctgagcatgtgttgcattcacttgtcatgcctcttaatctttagtctggaacaatttattctttgtcccctgcaacttgacattttttatgagtgtaggctttttattttataaaaagctgctcttttgattttctctaatgatttcttattattagattcaggttatgaatttggggaagtaacaccacagaattgatattttgtttttatctgttgttatgtaaaactatgaattcatattgataactacaatttcctttcagcatcacactattcattctgtgattcctcccttccatgtttttagcttccttcttcaacagcaagaagcctggttccattaccctcaataaatttacttatttactcaatcctagatatgaaaaagcaacttcagaattgctaacccatacatctttaaaaaggaatcctgttaactagtattcagtatttgtttagggtgctttttggttttagtctgaggacatatagtgtaaatactatctttaaataaagttacttgggttagtttttcgttctctcttctacccccaactctgtccgttggaagcataggcaagacaacctggggcttgtgattgatcatcagaagtttggtggggggcggttggtcttggggactgagccctcaaactatgggatctgacactatctccaggtagagtcagaattaaactgaagtagtggacacccagctggtgtctactaaagaaccgattgcttgcttggtgtgtggggggaaaatccccacacatttggtcacagaagtcttcagtgttgatggtggtgtgaaaacagaagaaaaacagtttgtgtttttccactcagtgtattataataatcccccttaacaatttaggaataaactgatattcctgacaagcaaaaataacttatctaaacatgtaatcatttgggctttagttttcacattcataaaaatgaaggcattggtctaggtgatctgtaatgtgctttccatccttaatatttttgaaaaaatatctgtgacatgttcagtatagctaattttgattaaataaacatattttaaacctatttttagaaccagttttggggagaatttttgcctttagtgatagagaatttttcccttaatgtaggtagtaaatgttataagattatattgtttatctacaaatcagcaagtataaccagggttctgaattctcatgtcatatgtaaatcagtaacctttcagagattaaatgagagcaatcatgtgatagcagcagcaaaagatcaatatgcaatgctagatatagaaatcttcttgtatctttaatatatatcttaattttagtccttgtattactgatcttgtgccatgtaacaaattaactcaaaacatagtgattaaaaacaacattaatatgtatgagcactcatagtttctggctgggtacttctagcattggatctctcatgaggtttcagttagatataggttaatgaaacacgcatctgacagcttgactgagcatggaagatcttctgtgttggtcactcgtaggctggcatgttgatgcttattcttaatgctggctctacacagtgagcaaagagacctagtgttagaagtcacaaaacgtgagttttatattccattggtcacactgaccaactccaattcaatatggaagaaaaactacccaagagcatgagcatcactgggagtcatcttggaggctgggttttagtgtctgtccttgtttttgttttcagtagaagaaatgacttttttagtgcccttgaaataattgctaaaatggtcctcaatgagatataatccttttgcacagataatggtacatttttttcttactagaaactagagcttacttactatatttacttactagtcctagagctcagtgttatttgctaaagaaaagttttcttttgttttgtttttgagacagggtctcgctttgtcacccaggttggagtgtagtggcaagatcttgtctcactgtaaactctgcctcccaggctcaagtgatcctcccacctcagcctcccaagtagcagggatgccaccatgcctggctaattttttgtatttttagtagagatgggtttttctcatgttggtcaggctggtctctaactcctgagctcaggtgatccacccgcctcggcctcccaaagtgctgggattacaggtgtgagccaccacaccaggacttaaagaaatatttgtggggctaggtgcagtggctcatgcctgtagttccagcactttgggaggctgagacaggcggattgcctgagctcaggagtttgagaccaacctgggcaacacggtgaaaccctgtctctactaaaatacaaaaaattagccaggcgtggtgatgtgtgcctgtagtcccagctactcgggaggctgaggcagagaatatcttgaatccgggaggcagaggttgcagtgagccgagatcacaccaccacactccagccttggcgacagaccaagactccgtctcaaaaataaataaataaataaaaataataaataaaataagaaatatttacggccaggcgcggtggctcacacctgtaatcccaacactttgggaagctgaggcgggtggatcacctgaggtcaggagttcgagaccagcctggccaacatggcgaacatggtgaaaccctgtctctactaaaattacaaaaaattagcccaccatggtagcagatgcctataatcccagctactcaggaagctgaggcaggagaattgcttgaacctgggaggcagaggttgcagtgagctgaggttgtgccattgcactccagcctggacaacaagagtgaaactccgtctcaaaaaaaaaaaaaacaaaggaagaaggaaatatttattgggttgggtggagtaggctcagagccatgaatgttccaaatgatagtaaaattggatctcagcttcctattttatggcaaacgaggtgattactggtaaaataaatgaataaataaaaaataataaaaataaagcctttaaagagaaaatgtaatagttctttccaatgatctttagattttttaccataatcatcagaattatctttgatggtttctaaaatgtgttgtattaatgtataatgtaaactttaataaatgtgcttttaaatgccagttgctgacattaaaatatatctataatgaagttcaaagataaatggaactttctgaaaactcctttgcaagttaatttagatataggaggtaggatttgaaaacaggatcacattataaactcaatagtcctagaattattatttaatatataaaagatatcaaaatgcatttgtaaacatttgaaagataacagaattggaaaattattgttcatttaatacaaaaatgctttcagaatctcttagctttttttgtcatttactagaaaaattgctggtttctgtattttttctttttcttcttctaactttttaatttattatacatcattgtactaacagtaaaggaaatttaaatgatgaaaataaaatctgccatcttatcaagttcaatgtgactgtaaccttttagttctttgtgtgtgtgtgtgtgtgtgtgtgtgtgtgtgtgtgtgtttggttggcttttattgatgtatataaaaagattacagacagcaagagaagataatcagaggccttttcgttcttatcaaattaagttgctttatagttgtatttttcttttatattttaatatgcatttgtaattgatagaggaaagaatttgtctttcctctgtctcctctaattttgtgccaaggaaaatctggcacagaattaatcaaatttttgcctaatttttatcatgatataattaaaaaattgagtatatgatactcaattttatctttattgtattttattagcaagggcttatttattaatgtatactaggttttggagaatgactttcaagtataatctgtttatttattcacaattggtttaccagtttcctgatgtttctgtccctttgcatttttggtcacatacctttgaccctttttggcctttccagtagaggccaactatagatggagaaaaaattcaatgcatcatttgccttccagtttaatcagtagagtaggcaatacgtgtacattttttgtttgttttttaaaagtctctctgccatgacatttccaatcccctagctccctctttaccactgttatcagtctcagaattatacttccaaagataatctgtgcacaaacaagcatgtgtaggcatatctgtttttcttgtacacagttagttgcatatcatacatactcttttgcacctcactttttttacttataaatctgactcattttttaaggttgtatagtataccatcatatctctttggtatcatttctttaaccaaacattattgctggacatttaagttatgttttgattgttagtgaacaatgcagtatgtatatccttttaaattcttagtgtatatatgtgagattatctgtgagatgaattctgaaaaacgtaatttctagtcaaagaacagtgcacatttaaaattttgttagattctatgaaattgcctaagaagttgaaccaatttatatttccaccaataacacataggcatattcttttgccaacacctgccaattgaagatatttcaagggccagcatttgatgtcatacaagagacatcaaatataccacttagtgaaaaatactttgttctatcccaaagaaaactattgataacccctctaagcctccaccctcctaacttttttttctttcatgggttattcatggctagtgtcctcttccagcaagcttaagcccccaaatcagtccctttcttttgtcctccacatcacttatgcgtgatcccaattggatttcacctctgcatttagtacctcctttccatttccactgccactgccctaattctggcctacttataacatctttggattattacaaagccaactaatcttccgttaaaaaaattctcccttctgtaattccttctcccaagtgctgtagttatcttcacaagatctgagtatgtaactgcattactttttaactatttcttacccacgcctagagttttcacgttgaccttcaagacacaatggcctggccttacctttccttttcaactttattacccactactctctctcatgtcttccttgcatgcacacatagctgcaattattctggatttttcatcatttcctggatagccctccattttcctgcgtaatccctttgcttttgttatttgtaacatatgcccgtaatattcccttttgcatttctgctaggtggaattctactttttaaaacttaggtcatatacgactccttccatgacatcctgtttccctggccaaaagtagttttttctatatgcgtcataataatgtattttgagatattgctagtatcaaacatatttcattatgtattttagttgtacatgtctttttccctcaggagatcacaatcactttgagagcagtggcaatatcatatccattttcatatacttctctatcccacacataatgtatgtttctagtaaactgaattataaatcctgtatttaaaattttttattttatagtgattttagagttttcctctttgttacagtttttagaatgctttaaaagatttaaaagtttagtatgtgcagagaagaatgtctgaattaaaacctgaaatatctttcagattcagtgccagaaaggcagtgtgatgccagaggaagaataaggtcttggaagtcatgtatatttagacaagagtcccagtgccatgaccactttttagctatgattatataaaaacccgaacctttttccttgtctttaaaatgaggtgactggagtaggtcagtgtttcttaacacatttctgttataaagcatatgccagattatatgtatgcacatgttcccatcagcatacttagattttgatagaagataaaagaattaaaatgttttaattttaattggattttgtagttaccacaactatttctgctatacttggtatagcagtaagtggccgacttcagaatgcagcacaggaaagatagattgctagttatatgtgagcctctctcttgcttcccagtgagctgcagctactttctcagaatgcaagtgggttagtgaggttgttataggaataactttgaatgtaatctaagttatgcagacattaatcaaaacagtcatagtattttaattatttataggaataaattacttcttacagttgatcttggctcctgatcttgttacattgttatgagctgctgaacaagaagatcttgaaattttcgtccaactttccaattctgattgtttattctcctttccaaagtatagttgggaataagaagacactgaaagttttcagcagttctttttgacctgggcttatggtaacgtaataggggaaaaaatgctttcagttaaagtaattggacatctaattagcatttcctattgaaggttaaatattaaatatttttcccagcaccatttattgagaagacaattcttttcccaatgtgtgtttttagtgcctttgtcaaaaattagttggctataaatatgtggatttatttctgggttctctattctcttgcattggtctgggtctgtttttgtgtcagtaccatgctgtcttggttactacaactatattttaagtaaggtagcatgatgcctcaagctttgttctttctgctcagaattgctttaggtatttgaggtctttttttttttttttttttttttcttttcttttgagacacagtcttgccgtatcacccaggctggagtgcagtctctcaatcttggctcactgcaacctctgcctcccgggtttgagtgattctcatgccccagcctcaccagtagctgggattacaggcatgcgcgccacacccagctaattttttgtatttttagtatagatggggtttcactatgttggccaggctggtctcaaactcctggcctcaaatgatccacccaccttggcctcccaaagtgctgtgcttacaggtgtgagccaccacgcccagctatttgagatcttttggggttctatacaaatttgaggattgtttttgtctaattttgtgaaaaatgtcattagtattttgagggggatcacactgaatctgtagattgctttgggtaagatggtcattttaatattttttagtctgtcaattatgaatatgggctgccttttcatttttttgtgttctcttcaatttctttcaccagtgttttatagtttccattgttgagatttttttcacctcctttgttaagtttattcctaggtattttattttattttatagctactgtaaatgggattgctttcttgatttctttttcagctagtttgttattggtgtagagaaacactcctgagtttcgtatgttgattttgtatactgcaactttactgagtttgtctattcattctaagaggttttttgatggagtatttaggtttttctatatgttaaattatgtcttttgcaaacagggacaatttgactttctccttttcgatttggatgccttttatttctttcttttgcctgattgctctggctaggacttccggtactaaattgaataaaagtggtgaatgtgagcatctttgtcttgttctggttcttagagggagaacattcaactttttcaccataaggtatgatgttggctgtggatttgtcagatatggcctttattttgcttaggtacattccttctatactgaattcattgacagtttttactataaagggatgttgaattttatcaaatgctttttctgcatctgttgagatgatctttttttgttatttattctgttgatatgaggtgtcatgtttattgatttgcatatgttgaaccattcttgcatccatggaacaaatcccagttgatcatgatgcataacctttttgatgtgctgctggatttaatttgttagtgttttattgaggatttttacatctgtgtttatcaggactattggcctgtagttttctcttttggttgtgtccttgtctggttttggtatcagggtaatgctggacttatagaatgagttttaaagaattcccttcccttcaatttcttggagtagtttcagaagaattggtgttagttcattgttaaaagtttggtagaattcagcagtggaggctaggtgcggtggctcatgcctgtaatcccagcactttgggagggtgaggcaggcggatcacttgaggtcaggagttcgagaccagcctggccaatatggtgaaatcccgtctctactaaaaaaacaacaacaaaatacaaaaaaattagctggccatggtgacaggcacctgtaatcctagctactcaggaggctgagacatgagaatcacttgaacctagggggcagaggttgcagttagctgagattgtaccactgcactccagcctgccagcctgggcaagagtgagactctgtgacaaaaaaaaaaaaaaaaagaaaaaaaaaaaagaattcagccttgaagccatctggtcctgggcttttctttgtagggagactttgtattgctgattcaattttattactcgtcattggtctgttcatgctttccatttctttctggttcaatcttggtagatcgtatgtgcccagaagttgatccatttcctctaggtttttaatttgttagtatgtagttgttcatgattgtctctaataatcatttacatttcttctgtattagttgtaatgtctccattttttattttattttggggggttttctttctctcttttttggctagctaaatggtttgttgattttgtttatctttttgaaaatgcaactttccatcttggtcttttggttttttaagtctctattttgtttatttttgctctaatctttattatttctttctaatatgatttacatatttattcttggccaaatctcatgttgaattgtaatccccagtgttggaggtggggcccactggaaggtgattggataatgggggtgaatttctcatgaatggtttagtttcatcactttgttggtgttctcatgacagtgagtgaatttttgggagatctggtcatttaaaagtgtatgggggctgggcgcagtggctcacacctgtaatcccagcactttgggaggccgaagcgggcggaaatcatgaggtcaagagattgagaccatcctggccaacatggtgaaaccctgtctctactaaaaatacaaaaattagctgggtgtggtgatacacgcctgtggtcccagctactcaggaggctgaggcaggagaatcacttgaacccaggaggcggaggttgcagtgagccaagattgtgccacagcactccagcctggcgacagaatgagactccatctcaaaaagataaataaataaataaaaaggtgtcaggcacctcctcttgtaggaagcatatagtcggatcttgttttattatacattccaccagttcatatcttttagatggggaatttaatccttttacattcaaggttattatttacaggtgagaacttactcttgttattttgttatttgttttctgctgttttatatgtcctttttgtctttttcctttttcttaattgtttatcttgcagtttggtggttttttgaagtgatatgttttgattccttttcttttctcatttgtgtatctgcactgtcagtgttttatgcttccccatgttttcatgatggtagttatcattcttttgcttacagatgtaggactcccttaatcatttcttgtaatgccagcctagtggtgatgaattctctcagtgtttgctttcttaggaaagactttatttcttccttatttctatagaatagctttgatcggtatagtattcatggctagcaatttttttctttcagtgctgtgaacatgtgattttattctctcttggcctgaaggtttctactgaggagtctcttcttagtctaatggggattccctaatatgtgacctgatgcttttcctatgctgttttacaattctttctttgtctttgacttttgacagtttgactataatgtgcctcggagaggaccttattggtttgaaattttctagatttttgagcttcctggatttagatgtctatatctctcccaagacttgggtagttctcagctattattttattaaatagtttttataggcctttttccttgttttctttttctgggattctcatagtattaatatttgttcacttaatggtgtcccaaagtcttgtaggctttctttgttcttttttatttccttttcttttcttcctgttttttctcttttattcttttgtctgagttatttcaaaaacttgttttgaaagtcagggattcttttttctgctttatctaatctgttattgagatttttctgttctatttttatttcatccactgaattcttcagctccaagttttctgtttggttctctttttattatgtctatccctgcattgaatttctcattgagataatgattttcttctattttatcgaattgtctatttgtattattttgtatcttgctgagtttaagatttttgctttgatttccttttttggcaatttataaattttcattttggtgggtaaattactggggaattgtgtctcattggtggtgtcatgtttcattgcttttcatcttggatccctgtgttgatatctgtgcatctggtggaacagttgcctattccaattttgtagaggggctttcgttggggaagactttcacctgcagatgtgttttagggtctcagttgggtggggtatgttgctttgttttgaaggggtagcatagtgtagtctccatgcagtttcttcagctgtagtcagtgttggcaaatgcctgcaagtgtctcagtggcttaagctgcagagttgtgtgaggctggcctacctactcagggtctcctcccttgagagtggggcacttggttggttaatgctccagggaagtgtggggctggtcagctgacagcttggctcaggtgctactcccctggggccatgtgctggcctggtctgtgctcagggaaaacatggaaatggttggcctacctcttggcttgggcactgcttccctaggggtgaggtgtcaggctagtccattctccaagggagtgcagggctgattggccatcggaatggcttggatgctgctcgcctaggggtgggataccagggtggtccgcactccaggaaagcagggagctagctggctggtggttctgcttggatgccagtcccctgtgggcagggcacttggaccaaaggtgttcttgtggatttaggttttgagtggctgggattgaggtgctgcaacccttgggatggggaatatggagcaccctgggcagcttgttttcaggagtttggaagctgtatcatctcagcttggtacacacttaaaatttaggttttgtgttttggttatgtttagacataatgcctaatactatatatgatatgggaactctcatatacttctggttgggaatataaaatgatacaactttactggaatgtaatttggtgttataatatcagaagctttacattgtctcatatatcttcttttacttcataattatttgattagaaaatatgtcttgagggaataattatatgtatataaatatttatctgcaaatatatttattgcattatttatgattaataatctaaaacaacccaaatattcaacagtgattaaatattattttatatttatacagtatagtcttatgaagtcattaaattatttacaaaacattttaatgatgttggaaaacacttacgttgtaatagtaattaaataaggcaggataataaaactgtaaagaacatgatttcatatatttgagagagaagagagaaaatttgaaagagtgtgtttgagtgtaatgggggatttggtaaaatttaaaaaaaagattctgatttagttttcatttctattttctgttttaaaatttttttcctctaaagtccatgtacaattttcataataagaaaagctaatgcatcctatttttaaactaacattgttagaattagggagaagatggttcatttataggaaaggatatcatgtttgcaagaaaatttgtaatggcatgaggaaacataataaagggagaaatctacgaaagtattaataatgcattgacaaaagtatagaagggaatacagaaacatattagtctttcttctggttctgtaatatgataaaaacatttataaagctgggcatgctggtatacacctatagtctcaactacttgggagagtgaggcaggaggatttcttgtgcccaggagtttgagtctagcctgggcaatgcaatgagaccttatctctaaaatataaaacaataaaaatataaaatttaaaaaatttttctgcttttcaatttttctggaaagaaatatatcttaattaaaggaaaagaatttaaaagcaggctgatactcgagcattttgaggtcatatttgatgtgaaatgacattcaaaatttcagggagttaatttttttctagcagcacattgaatgatgctaaaaggaaacaaaatgggaaaaaatggaaagagcattagactgttgcacaacgttgatttagtatattttgtttattcatatggaagggcaaactcattcagcaaactttgtaagagtaccttgtaggtgcagagaaaagtactgctcacttatggaatgaagtgggaaaaaagtaaaaacatttttacttttccatttttctggaaagaaatacataatgttttggctggtcatggtggctcatgcctgtaatcccagcactttgggaggccgaggtgggcagatcacctgaggtcaggagtttgagagcagcctggccaacatggtgaaaccccattttctactaaaaatataaaaattagccaggcgtggtggcaggcgcctgtaatcccagctacttaggaggctgaggcagcagaattgcttgaacccaagaggtggaggttgcagtgagccgagattgtgccactgcactccaacctgggcaacagagcaagactccatctcggaaaaaaaaaaacaaaaaaaaaaaaacaggaaaagaaaaagaaatacatcatgttttaattaaaggaaaagtattgaaaagcacactgatactagagaattttgaagtcacatttgattatgcacaaagaaggcatgatccttgttctcaaggttcgtactattcagtatggaagataaaaggtattcacaaagaactaataaagttaacgtatttaaagtgacatatttgggtggccaaggattgcttgaggccaagagtttgagaccgtcatgggcaacacagcaagaccccatctttacaaaaaatacaaaaaaattagccaggcttggtggtatgcacctacagtcctagctactagggaggctgaggcaggagaatccctcgaacccaggaggcagaggttgcggtgagtcatgatcatgccactgcactgcagtctgtctgacagagcgagactccatctcaaaaaaaaaaaaaaaaaaaaaaaaaaaagaaggacactatggaaatagtggtatttgaatgggctcttagagaatgggtctgatttcaacagtttttcatgaaaaggatgtgcatttcaggtagaggaaagatatgagcagagaaacaaaggtgacaaggtatgggagcaatttttagatcaatgaaaactttttttaaaaccagcttttaaataatactttcaatgtacaatttagtggttttttagtatatttaaagagttgtgcaaccatcaccaatacctaattgtagaatatcttcatcactttaaaaagaactctgtaccattaatagtcactctgcatttcttcttctctctcacccctggcaaccacatccattttctttccctgtggatttgcctattcttgacatttcatagaactctatcatacaaaatgtggccttttgtgactagcctcttttctctttgtagaatgttcactcatgttttagtatttatcagcactttatttttatgacttcactgccaaataatattccacaatatggatataccacatccatttgtttcccttttcatcaattgatagaaatttggggtgtttcaactttttggctgttatgaataatgctgctctggatatttgtttaaaagttttatatggacatgttttcaattctcttgggtgtatagctgggtgtttacttcctaggtcatatgttaattttttgtttaaatttttgaggaactgttaaattggtttccagagtagtggtaacattttatatcctcaccagcaatgcatgaagattccgattcctccacatacacaccaatacttattattgtatatcttccatggttacatgacttggttttctagtgtaccttggagttggagaatggaagatgggaatagagaaaattaaaatgccatagagctctctattcttagcaagattcactcatttttcttgaataaacacttctcgattattgcaagtctttggttaatttccagagctccagaagaattgattctgacaattttgctggtgttcttgttgcttttaggaaacagcagattttctaagattcttacactaccattctaaagttgctttagtattcttctaaagttgaatactcctttttgttcgtttttatgccaaaggtaggttgatgccagacattgatgagaattgctctttctttttaggctactgagcaggggtatgacctgctatgccttgatcagagctatggtttataaattggagcaaggaataaaggcctctgtatatttagaggtgctttggtttttgttgttggtttttttcctttccaacttttattttaggttccagatatacatgtgcaggtttgttacatgggtaaattgtgtgtgtgtcacaggggttttgtgtacaaataattgtgtcacctgagtaatcagcataatacccaattaagtagtttttaaaatcctcaccatcctcccactctccacccttaagtaggtcccagtgtctgttgttcccgtttttgagtccatgtgtactgaatatttagcccccacttataagtgagaacatgcagaaccaaatactgtttttctgcattatatcttaggattatgaccaccagctccatccatgttcctgcaaaatgacatgatctcacttttttaatagctgcatagtattccatggtatgtatgtaccacattttctttgtctaatctaccattgctgtgcatctgggttgattccatgtctttgctattgtgaatagtgctgtgatgaacatatgcatgcatgtgtctttatggtagaatgatttattaatacatttctttgggtatataccagtaatgggattgctgggtcaaaaggtaattctatgttaaattctttgagaagtctccaaactttctacagtggctgaactaatttacattctcaccagcagtgtacaagcattccctttcctctgtaacctcaccagcatgttattttttgagtttttaataatggccaatctgactgatgtgaaatggtatttcactgtggttttgatttgcatttccctaatggttagtgttattgagcatttttttcatgtgcttgttggccatgtgtatgttttttgagaagtgtctgttcatgtactttgcccgttttttaatgaagtttctcatttttggcttgttgatttgagtttcttatatattctggatattagaccttggttggatgcatagtttgcaaatattttctcccattctatagggtgtctgtttactctgtttacagtttcttgccattcagaagctctttagtttaattaggtcttacttgtcgatttttgtttttgttgcagctgcttttggagtctttgtcttgaagtctttgcatgggctgatatccagaatggtatttcctagattttcttttagggtctttatacttttaggttttacatttaagtctttaatccatcttgagttgattttggtacacagtgaaggtaaggatccagtttcaatcatttgcatatggctagccagttatccccaaaacatttattgaatagggagtcctttccccattgcttgtttttattgactctgttgaagatcagctagttgtaggtgtgtggatttatttctggattctctaacatgttccatttgcctgtgtgtctgtttttgtaacagtaccatgctgttttagttactgtagccttgtagtatagtttgaagtcaggtagtgtgatgcctccagctttgttctttttgcttaggattgctttggctattcaggctcttttttggttccaattgaattttagtgcttttttttttttctaattatgtgaaacatgtcattggtagtttgataggaacagcattgaatctgtgtattgcttttggcaatatggccattttaacaatattgattcttcttatcaatgaggatggaatgtttttccatttgtttgtgtcatctctgatttctcttagcagtgttgtgtaattcttgttgagagatctttcacctccatgattaggtgtattcctaagtattttggtttttttgtggctgttgtgaatgggattgctttcttgatttggctctcagcttggatattgttgatgtatggaaatgacattgattttgtatgctgaaactttgccgaagttatttatcagatctaggagcctttgggcagagactggagtttcccaggtatagtatcatattgtctatgaagagagatagtttgacttcctttcttcctatgtggatgccttttatttctgtatcttgcctaattgctttaactaggactccctgtagtgtactgaataggagcagtgagagtgagcatccttgtcttgttctggttctcagggggaatgcttctagtttttgccccttcatatgatgttggatgtggatttgttgtaaatggtgcttcttattttgaagtatatacctttgatgcctagtttgtttttagcacaaaaggatgttgagttttatataaagcctttcttgcggctattgagataatcacgtggcttttgcttttagttctctttatatgattaatcacatttattgatttgtgtatgttaaaccaaccttgcatcccaggaataaagcctacttgattgtgatggattagctttttgagggatgtgctgctggattgagtttactagtattttgttgaggattttttacatctatgttcatcaggaatattggcctgaagatttcttttttcatttcatctcttccaggtattggtattaggatgatgctggcttcatagaatgagtaagggaggagtctcttctccccagttttctggataggtttaataggataggtagaactcttcttcatctggtaggattctgctgtgaatctacctggtccagggctttttctggttgatagtttttgtattaccgattcaattttggaactcattattgatctgttcagggattcaatttctttctgcttcaatcttgggatgttgtatgtttccaggaatttacccatttcttctaggttttctagattttatatatatatataattatatatatttatataaatatataaatatatataaatatataatatataaaatataaaaaatatataaaatatatatataattatatatatattttatatatatttttttctaggttttatatatatattttctaggtttctaggttttctaggttttatatatatatataaaataaactcctatatatataatgcttaataaactgtatatataggagtttattaagcattatatatatataggagtttattaagtattaacttacattatcacaaggtcccgcaataggctgtctgcaagctgaggagcaaggagagtgagtccaagtcccaaaactgaagaacttgaagtccactgtttgagggcaggaagcatccagcatgggagaaagatgtagactgggaggctaggctcatctcgtcacttcatgttttctgctttacattcgctggcagctgattaaatggtgcccatgcgattaagagtgggtctgccttccccagccctctgactcagatgttaatctcctttgacaacaccctcacagacacatccaggatcaatattgcatccttcaatccaatcaagttgacactcagtattaaccatcacaggtactataaactttcctcttaatactgctttagctctgtcccagagaatctgctatgttgtatcttgttttcattagtttcaaataatttcttgattcctgccttaatttcattgtttacccttaattcattcaggagcagattgtttaatttccatttaattgtatggttctgagagattttcttggtattggtttctgtttttattgtgctgtggtctgagaatgtggttggtataatttcggtttttaaaaatttgttgagaattgctttgtgttctagtgtgtggtcaattttacagtatgtgccatgtgcagatcagaaggatgtatatgctgtttttgttgggtgcagtgttctttagatgtatgtttagtgtatttggtcaactgtcaagtttaagtctccaatattctgcctcgatggtttgtccgatactgtcagtggggtgttggaagtttcccactattatcatgtggttatctatgtcttttcgtaagtctctaggaattcatgttatgaatctaggtgctccagtgttgggtgcatatatatttaggattgttaagacttcttgttgatttgaaccctttatgattatgtaattcccttctttgtcctttttgatcattgttggtttaaagtcagttttgtctgaaataagaatagcaacccctgctcttttttattttatgtttgcttgttggatctttctccatccctttactctgagcctttactttcccactgtatgtgagatgggtctgttgaagacattatagcgttaggtcttgcttatttattcaacttgccactttgtgccttttaggtgggatgcttaacctgtttttcttcatggttaatattgatatgtgcagatttgatcctgtcatcatgttgttggctggttgttatgtagacttgtttgtgtatttgctttatactgtcgatggtctttgtatttgagtatatttttgtagtggtcagtaattgtccttcatttctgtagtactcccttaaagatgcaaggacttcttgtaaggcacatcactagataataggtaataaattatcttagcatttgcttgcctgaaaagggtcttatttctcctgaagctagtttggctggatatgaaattcttggtttcaatttattttccttaaggatgctgaatataggcctccatactcttctggcttgtagggtttctgctgaaaagtctactgttagcctgatgtggttccctttgtaagtgacctgacccttctctctaggtgcctttaatattttttctctcacattgatgttggaggatttgacgactgggtgctttggggatggtcatgttgtatagtagctcacggcagttctttgaattttctgaatttgtatgtcaacctctctagtgaggttgggaaaatttttgttgacaatattctcaaatatgtttttcaagttgcttgctctctctttctctctttcagggatgccaataagttgttgatttggtctctttacataattccatatttcacagagactttgttcagttttttaaaattcttttttctttatttttgtctgagttaatttgaagaactagtctttgagctctgagattcttttctcagccttgtctattctgctgttaatacttccctttgtgttatgaaaatcttgtagtgagtttttcagctttatcatctcagtttgtttctttcttaaattgagtgttttgtcttttattctcttgaatcatttgattggattcgtcagattcattggaataggtttcaattttctgttgaatcttgattaatttcattgccatccagattctgaattctacgtctgtcatttcggccacttccttctggttaggaaccattgctggggagatgttgtagtcatttggaggtaagggagacactctggcttttagaattgtcagagttcttgcgttggttctttctcatatgtgtgggctgatgttcctttaactgcgatgtaatttgagtgtagtcagttgacttcatttctggatgtttttagagggccgaggctttgtgcagagtctgtatttgtgcctgaattcttgtccttggttccccagaagcgtatattagcaaagtatttttggtgttgatgtttgggctatgatccagtagatggtgcttaaacataatggcctgtaggtaggttcttgctcagccatgtggctcctctgcatttccttgcatgtgcagctgtgctccctttcagtggtctgagaatgtcagctcctctcacacttgagtgctggctgcagatctgtttggcagtgttgtgctatatactgtagccctggatggagctcaggctttgtgctccctcccaagcttggaaccttggcagtggcgatggcagagagcctttcacttgtttcttgaggctccaccccagagaaacacaaagctgcctgacaatcagaacaatcaacctggggtggggtgggtgccttgtaggcccaagccaggaaggcttgcctggtgacaaacagaggggagtgagagattcacagggaagaaagacaggcctcttccttgtagggtggctgtggcatactggaggtatgagtaaagtactcagggtctttatttctttcccagtccgagggcagcaagggtagtaccactgcagtggtactggcagaggggctttcagttgcctctgggagctccaccccagaaaaacagagctgttgccagtgggaatgttcagctggggttgggatgcctatgctgcagaaccaagccaagggctctgcctggtgaagactagggaggtggaggctgacaaggaagagagactgggctcccctccacatggtggctgcggtgtgctggaggcacaagtcaagcactcatgtctttgttccttcctcagtctgagagcagtaagggcagtaccactgcagtggcagtgacagaggggctggcagctgcctttgggagctgcacccctgggaaatacagagccattgccagtgggaattttcagccagggggtgggatagctgctttgtgggtctgagccaggggcgctgcctggtaaagaggagggggtgagggctcacagggaagggagactgggctcctctctgtatggaggctgtggtctgccggcaaagcaaacaggcaaagccctttgttccttccccagcctagagcaataagggcagtcctgctgcagctgcaatggcaggggggctgtcagttgtctctgggatgtcctctcctgagagatgcagagttgctactgaccgaattgttcaggccaggccgagaggccctgcccactgaggagtaacatgggcagggtttaggggtactttctacagactaatgaaaatcatttcatggggaaatcatggctccatgacacactggatggacctggggttaggaaaggaaatactgaggagagtatcaagctttactattgcttgtttggaattgggcttctatgtgtcagtttcctaactgggatgattttacctctccatccagaaatattctgttggcctagagaaactttttcaatgccttgtcttcacagatggaggagctataagtagagctttctttagtaatcacatctcagtaaccatgtgcagaaatcaattatcttaatatataccttatcaagttaatttttcaagaacaggtaagaatgagtgagcttagaaagtttaattgggaaaagagtgaatataagaaggtgataggatacctccttcaaaaggctaaaagattaacacatggaaagtaaaagaaacttatttaaatttctgtagaagatagaagtaggaccagtggatcaaagttacaggaaggtggatttttagatctatctaaaaaaggaccaagaaattagaactggcttcttctgttcaaatagtaatcagtgtgagtcacttagggaggttgtcaaagaaattcctgattgggagttgtttgaactaacacacccaaggacctttcttacttgaagaatatgtatgatattttacatgtattgaaacagctgtaaagagaaatgactcgccacaatttcttgcttaaagctttagttcatttctatttattacccaaaagtgtaattttcatttaagaatataagaaatgatacatctcagaattcaaggaaatattatatagataggccttaaaaaaggagggaccagtatggttctgagaaactcagctgagcctttcttttaatgctctaccactgagatgtttagcttccagttgacagtctatgtgcctttaaattcaaattctcaaatgagatactctaatttatttagtttaagttataagtctacccttgattcaatcatctgtagccaaaggagtaagggtcatataacagcaacagggttaaaatggtggtagggatgggcttttttctctggatggtggtcagttgctgctctaagtggagagatgaagtaagtcatgggctagatatctcataagatatttattagatttccaaaaatgttaatggtagaagactatgatttagactgtttgttgtcaatttcacacaaccagtatttatcatatggctactatgtgtaaggcaccatgctggatgattgccagaatgtagaatacaagatattgtccctgccccagggtatttacaagcactctgtccagtagactggtcattatttaataaatcatcctgcttaggttttactttggaagggctagctttctgattatgtagaaaggtgccttattaacttttgaaaaagtttcaagttgagtattaaagatgtttgccttttctaagcatacacacatttaatgtttgtgtagaccaagcctaaaagaccatcacaagctcatactccgagaacaaaaccccaatccgttctccccaaacaaacaaaaatatgagttgaatatcttatttgctagcagtatgttacattaaaatttgtgcttggccaggagtggtggctcatacctgtaatcccagcactttgggaggccaaggtgggcggatcacctgagatcaggagtttgagaccaacctgaccaacatggtgaaaccctgtctctactaaaagtagaaaaactagccgggtgtcgtggcgcaagcctgtaatcccagctactggggtggctgaggcaggcgaatcgcttgaacccgggaagtggaggttgcagtgagccaagactgcgccactgcactccatcctgggtgacagtcagactccatctcaaaaatataaaaaataaaaaatgtgtgcttgttcttatatgtacataaggtggaaggtaaacattttaagtgtctgtgagctacctagtattctaggcatgtcatatatgtaacatgcatatgatatgcagatagtgtatgcactattataataatataatccaattatagtctttattttcattatcttaaggatatttatatagttcaattgagtcgctaggaaataaaaaaaagttttttaagggtggggccttgctatgttgtcctggctgttcttgaactctgggcctcaagtcatccttttgcctcagcctcccaagtagctgggactacaggtatgcaccactgtgcctggccaagaatatttctttgtttcctgtttctgtgtttaagctgcatttagtttggcagtgtttgaaaggtatcatttctggtttacattcagctcttgtcctttctaccagctgagtgacttatgaacagaaaattatagagtaaaaataatatgacatatatgttaggctctaagcccttcaccttttttttttccttccaaataaagatgaagcagcttgtctaggtgcaatgccatgttaatatcctgtaaagataattagtagctgacttagcatattgcttggaggtttcctgagagaccaactttagctataatgcaagagatatttgatttctattaatacttgaataagtcattggttttatcaagatcctatatttaattataacttggggctggacacggtggctcatgcccgtagtcccagcactttgggaggccaaagtggaaggactgcttgagcccaagggttccagaccagcctgcgcaaaagagggagcccctgtctctacaaaaaaataaaaaattagttgggtgtgatagcttgtgcctgtagtcccagctattcaggaggttgtggtgggggaattgcttgagcctgggaggttgaggtttcagtgagccatgatggcaccactgcactcccgcctgggcaatagagccaagaccctatctctaaataaataaataaatcctggtctatttaaaaccctggatttgttttaaatagccatctaatttttatgctacaaaagagttaacatactttcttgtttttggaatctctctgaccttagaaccatactaactttgccatggatatttcttggggcctatttttccaaaataatcattctctttttttagagtctactgttcattttaattaaattgtttcccactatgctggtatgatttcaggaaaggagcatttaagtcatatgttcaatcaaaacttctgcaggtaaattataacccacttttcttttttatttcatgtggtcttggcaaatcatgttttaattgtggtcaaaatctgcatagaaacatattgtttcattgatttgcataatattttggggcattttaaaaatatacatcaatccccagagatcttaagctctacttgacagtatttagcatttacttctgcttaaactctgatatatttgagaaagcagaaggtaccacagtataatggtatttttccctttattattagttgtagtatataatattactagcagtattggtaaatattttagaatttgaatgagcctgcctttcaaatgaaatctaaatctttctgttggtttttattttattactactgcatccagtgttatctgaatatttaaagtatattaaaaacattaaagacaaaaagacaaaagttttttaaagtatatattttttctcactgcataggatattagactacatatgtgccatctattttaaaactaatttcattcatcaccatctgttttcaagaaagatttaaggtggcgtatgtgcgctcttgtacttggtctcacaggctctgtctctctaacatacaaatctcctggaagtcaaaggtcatgtcttttcttctttctcctccatcttttacatctggctaaaattatattctgtatgcatgaaaatgataattacatattacctggtagttatcagatagttcacaaatttcctggagaagacataggaacaaaacagggccttctgtgatgaagaaagatgagaaaaatggagtatgacatcaggacacttagccttagtgttcttactcattacttttgtaaacctgtaacattttttcccatgctgttcccttttctgcttcatgtcttgattttcccatttgcaaaataaggatggaaacagttgcttcctgtttatttgatggggaatttaaggatgaatgggctagtgtttccttccccagatgtatcaacttaatcttatttattttctgtccatacttctgattccataatgtccaattgtatatgtgttttcaattcttttatttacattcttttccttttctgggattcttcaaaatcaaagcatgttaatcacatttcatagtgcacttgagtacccaagatactcttcagatatgggctaatgtttgaatagctctatttgcttttgagtgtctatcaaaacccaggccccagaccatcaaagcatgtaatatgagaggtgtccccagcctgaaatgcagatcagtttccaaggtgttaaagctttttctgaaagcctcactttggtctgctcagatgccttcttttcttttaacctagttgagcagttatgaaccaatgccatgatgaacagttgggtttgatcagtgcaggggtctattcaggagcattaactgaaaagtctactttctcatctgaaaaacagatgttttaccgtgatcctcaacatgtatgtgcctggcctctctgatactgattgagaaaaagaaaaacagtttagtagtcaatatctggggtcttcatcagctccaaataaactattaacagttaaatttcaacataagaaaaaatagagggccttgggactctgaaacaaaccactcattgatagaatttcactgaagatcagagccaaagtaatgcctaacaatttataaggttgtgcaggggaagaaaactggtcctgatctgatgtagggagtccagtgagagcaagcacttagttggagactcaaagttctgtagcatggcctggaagaaattagcttgtcctagaagattttgaagttaggcgctaacaattataagcatctatcactttgatatggctctcaaataattaaagaaattttgtcctataatgaggtgcctaaaggatataattgtttagtaatatttgagtactatagaatgtcttccagagagcataggttttgggttgccataactgatactgagttgttttttgtttttctgtctgaagtggccagagattcaaatgcctcttgagcctcctcctcgcatgtgcaagtaggactgtggtcctggcccacaggagcctcttcagctttcctccagctgtggcacaggacatgtgttcggttcactcgatcacattattaagtaacataggtattatttaaaaggagaagagtgagggcggagtcctattttatggcatttaagtttggaaccacttatgtcaaaactcatttctgtgtttatatgtacttcctaatttatttataataagcatgttgaattatgaaggagaatgttatttcaaaattctattggaggctacttagaggctgtggtgacactgaatgagagctctgaaggaaatcatagtgaaacaggaaaagttcccttgtccccgtcgcagggcatgcgacaagggggagtggcttgcttcttcagtgccccactgctcaaacctctaggggagaacacagatgggcaggctgtggggctctgaccccacggcagtgtctaggggtaaatgtttacagctgaagccccagtgaatgttgaagaatacgctttgacctacatattgacagaatttactgagttatagagtgataaatacttatttttttttcctaacaattatgtgatgttttggcaaataatatttcttttttctttttctttttcttttttttgagacagagtcttgctctgttgcccaggctggagtgcagtggtgcgatctcggctcactgcaacctccaccttctggattcaagtgattctcctgcctcagcctcctgagtagctgggactacaagtgcatgccaccatacctggctaattctttgtggttttattagagatggggtttcaccatgttagccaggatggtctcgatctcctgacctcgtgatctgcctgcctcggcctcccaaagtgctgggattatagatgtgagccactgcgcccggccgcaaataatatttcttaatttcagttgcatttatttttaaataggaaatacattcacctggttcagaatttcagaggttacagagctgtacgtaggaagaagttttgttttctcccaattccgcaagccatctgattagcccccttgaaggtagctcaagttactagtttcttttatttccttccataaatatttgatatgcataggagaaagatatatatatatatatgtatttatgtatgtatgtatgtatgtatatgtatgtgagaatgaatggataaataagcattcctctttcatacagttacttgcttaccatacctgctgttctataccttgcttaatttcacttaacactatgtcttggaattcattccatgttagtacataaaatgctgcttttttctttcttgtggttttgtggtatctattgtatagctgtattataatttttttttaactaggtccttactgatggacatttatgttgttgccagtcttttcattacaatgactaatgttgttttcttagttttcacttttcaattcatttcctaatttagtctgagcctacatattagtgccaagaactgaggtatttattgtgttctgacacatctgaggtatttgcatatagacatctgggtacatatgcacactgctgaactgtctaataatagtctctttccccaggacactctcctaaggtaaaacctatatattggaattcttatgctgtacatatatgctggatcacaactcttactgtcagactagagagtttcaacttttaacctgtgatttcagttattgtgacatatcctatgtttcaattagaagagacaaactttatttggtgagattcaaatagcgttcatgaaaacggtatcttttaataaagtgaggttaaaaaaatgggaaccacctaagatcttagagtgagaggagtagagattatgaaagcagttttactttttgattttagggtctttctatataatttcagcctgtatcagataattccgtttaggacacagctggtacatttaatgatcacaaactctgaaggtagtaactggatgcaataatcacacaacaaagtcattgagtaggtttgttgacttatgtcagattactctaaatcttgatgatattgcctggagcacaaaaaaggaatattgtcacagcaagcaatggaggttttgatactcgatcactggagtattcttttcccctaaattttgcgctcgttgtatcataactgctggtttcttagcctactctgatgttgtgcagaaaattgtacaatacttaaaaacgtgatatctaggaaagaaaattagtagaaaaaagccattagaactgatatatattagcattggtttggtggttacttattaaagataaaaatggagaatatttcatatttcttgatagaaaaaaagtaagttgccattcatgcaagtaaatcatattaatttaggtttttggcattttttttgttttctgagagaaacatgaagagttctgcttatttattttttatcttgagaatgggaacacattaacaagtacaagcgacaataaaacttactccataactacattatgaactatattaacttactctacaactcgataaccaacattatggttggttaaataaagagagtgaaaaagacagagagggaacgtgagaaagaaacaatctttttgtttcccaaagctgtaagaagcaatgataagacattgagtgtgtacgtgtgtgcatgttggggtattttagtattgtgtttatttttgttgggagtgagcagaaaatgaagccttcagtaaagaaattaataaatcttattagaacttgttgtaaatattttttaaattcctaaagttggaacactaaggcattatttaaactttatctctgttttttaaaatctgagaaacccattaacttttaccctagaaaatggaaagtgtcatatctcattttacagaggaagttaacaggtttattgtcttgttgtaacatcctaatcctgtgacattttgaaatagtgcttttggtagtgccttgtttttgaaactatagacctctggggcactatggacattttgtactagataattccttgtcactgggggctgttctgtacattgtaggatatttagcagcatctctgacttctacccactagatgccagtagcagcactcccttgggggacaaaattgtccccagttcagaacaactgctgtggacatacatggtggtcctacacaactggagtttaaatatggatcctgaacagctttcatcagtctgatgcacttccccaatatttgtaatcatgaggagcagagcaaaacaaaggcataaatgttggggtaatattttgttttccaaagaccactgctcaatttgggggaaatttttgaagaaacagcaaaggtaacccttggagtctggattggttggttggttgattgattcattcattcaacaaaaatatattgaacccctgctatatatatgcctgcctcaatactgatgacttgtacgctgctgtgtgtgtcttatggcagtatgttaaaaaaaatccgtggataataagtctgatggtagaccagttaagaagctgctagctataacattggtgagaaatgatggttgcctgggttttggtagtgacagtggaattataagaaattttatacagagatatttagaaggtaaaacattaggatttggtgattaactggagaaaggaaggcgtcaagaataatttccaggctttcattaagatgaggactagagtaggaaaaactgtcctttcttttggaataggagcagataattgacttcagcttttgacatttccaattggagctgcctttgagacatccacaaggaagagttagacagtgaacttgggaaataaatggattgtgtctgttttgttccttattgtacctcctgttctttagacagtgtctgcatttctagagacacagagagatttaggctggatgtatagattgggtgttcttcagggtatatagctagtttaattgaaatcaaggaagtagataacattatccaaggagaatgcatagagaagagggcctagtatagcaaccttatgagcagctttttcaagggactgaagagaggagggactggagaagtatgaggaaaatcaggagtgtatagttaaggaagccaaaggaagagagagtttgaaaaagaagggagtgttttatggttctgaattcagctaagagttcaagtaaaatacaaaaagattgtttaaattaaaaaagccattggattttgtaactaaaaagcatcagtggccttttagaagcctttttggtagtctggtagtttcaggagttcagtaaatttggttaaagagttaagtgggaggtgattggataggatcatgggaggtgggaggtcatactttcatgcattctggctacaaagaagagactgaagatggtatgtgaaggtggtattgaaatgggaaaagttcccttgtcccccttgcagggcgtgccacagtggggagtggctcgcttcttcagtgtcctgctgctcaaacctctaggggaggctagatgggcaggctgtagggctctgaccccatggcagcgtctaggggtgaatgtttacagctgaagccccagtgggcgtgtgtcacagagtgctcttttagttttgccgtctgtaggcggcttctgttagctcagttagactcccttccttatctcaaggacagagggctttctgtatcctggagttcttgccttggtgtaatggaataattgaatcactcgtgggcttggagaatgagcgcaaggttttgagtggaggtagctctcagcagatgggggaagccagaaggggaatggagtgggaagtttttcccctggagttgggccgcccagaggccggggctctccaacgactgccccagccaaactccgcgttgttggcttgccggtgtgctggtgcctattagtgcgttcctctcgctgtccagctgcccgtgtgttcctcggctcgtgtgctcctctcaacgtccagccaccatgtgtccgcctgctagggtctcggggtttttataggcacaggatggggggcgtgatgggccagggctgtattgggaaatacaacatttgggcaccaaggcagaagtgcctatactcacctaggcctgtgggcccaggtctgggggtagagccctcgccagggaccacgcgctccccttcccatcacttccctgccccctttctgtatgggatgcagggagggcatgtgggcttgagtatatttaaatgctgataaggagtcaaggatagaggttgatacgagagtggagaaaatggggcaacttgagatgggatgaatccaaagcacagggagaattaatcttaggatggataccctccaaagtcaagggatgttattggtgatgagaaaggcatattctgttaggattaatttctaatattgggggcttcttgagggaataatacttctggggtttcctgaaagttcagaatggcaggcattaaaagatgcctggggccaggcgcggtggctcatgactgtcatcccagcactttgggaggccaaggtgggtggatcacctgaggtcaggagttcgagaccagcctgaccaacatgatgaaacctcatctctactaaaaatacaaaattagctgggtgtggtggtgcatgcctgtaatctcagctactcgggaggctgaggcaggagaaccactggaacccaggtggtggaggttgcagtgagccaagattgcaccattgcactccaacctgggcaacaagagtgaaacgccatctcaaaaaaaaaaaaaagagagagagagatgcctgtgacagcccatactatttctgattccctagggtccactgatccccagagattccattaatttgataatgctctttattttgggtagctggcatataccagaattggaccctgaacctatggattaagtttgggtttggggcctaattctagtctaataatcagagtagcagggtgttctgagaccctctggagacttttcccattgtcaaagtacctctagccagtctaccttaattagcaaagatatcattcccattatgattcatcatgattgactggtctatatgatggattactgattgtagaaaactctggattattatagtattatgcttagaaaaccattctgttcaaatgttaaagggttgacaacagctcactttcttctgtggtttaacggaaagaaagttcgctgtggaaccagaaaaaaaatctggctccatcggtgattgagctatggggccttgaacatcctgtgaggatgttacagagtcatttactctctgtaacattacctggtaatgcctaatgtgcatcatggttagaattgaaggtcatgtatatgtaccattacattgttgatattaaataaataagaactgatagtatttttattgacttaaaataattattttattgacttaaaaataatatttttaaatatttaattatataattattatatatataattatataatatattatttatataattatataatatattatttatataattatataatatattatatataattatataatttattattatatataattatataatttattattatatataattatataatatattattatatataattatataatatattattatatataattatataattatttaaataaaaataataactattatttactactctagggccctaagtgagcacttattgttagaatttattgttagaattccagatcaaaatcaaggatctcatttctccatgaatctaagagctattattggtgatgtctttggtataagtttttgtaaggacaaaggttttgttacagtcctggccctactaaaacgtcttttattgacctgcatgctatcatagtaaatagagagaaaagagataaaattctagactttttaaggtatatggaaataaatcaaatttacttacttacttttttaccgtgaccaatttggatcgctgtcattttccatgaatgtgtctcaggtttttgtttttttaatagagagagttagctgtttcaacctctctttctttcgtctaataactcctcatttttttctccctcttttttcatcttcttcctttctttcagattattggaaactttctcatgttgcagcatttgctgctatcaattatgccagaaaagctttctgtgtactagcagtgttatgggatcgtgtgtgtgtgtgtgtgtgcgcgtgtgtgtgagacagagagagagagagagacagagagagagaggtgggggggagattgagatggaaagagtggcgggggatgaaggaagtgggggagagaaataaatggtgtctggggtaattgtgctggtgttttttcctgcatgagagaagcttcagatgtctgtctggctttggctcagttgctgtatgggcgtaactgaagaaggaggttggggtagaggagaaggcaattaaaactttgaacaccttaaatgcccttcctaattaagtggtgaggatggaaaatgaaataccttcttatgcttcatttctgttctccgtttaaaagtctgtggagggatcagagctcatgtccttagaaaggacagaactttcaaaataacaactctgaaaaacaagtttaaaaaaaatttctcatcattttctgcttttcatgaacttttaatataaagccatcattatttttttttcctgggcccccttacctatatcctctccccactctcattagtcactccaactttgaagcacccaattctctggagtattaatggagacagttcaagtatctaactgctgtttcctttgttcaagttgcttttggtccttgctgggaaatgctctgaaaactgaaccagctactgaacacaaaggctgacggtgttgtccctcctggtaatgtactgtgtgatttgttcccctctcctgttcatgactcattagtctctaagtacagaaaaggttgctcctctggaataaaaggaacggacccagctcggagtcctttttcgccttttcctgtgttttatatgggtgcactcacagttctccatcttcattagtgacccagcagggggctggcacagggttgagactagcttttgctggttccctggggtgtatcagagacctcagaactcaataccctactataaaaataaaatactgtgcttcaaacgaccttttgatggaacaaagccatacatcccaatctgcctgggcctctcaaattgagaccatgccaagtgccagatttgcattttgcacatgccctcccaccatcccctttcccccttcctctaaatgtggttcttttggtagcctcagtgtcaggtaaatgtttatgtgtgtgtgaaaacgcagactttggcaaaagaccttttgtatttaaattacacttcaagatagtagtttcttgtaagagatgtaggcagcagatatttgtgggcttttatgccctaaatgatatcattttagatttatatatgtgggcttttatgccctaaattatattattttagatttatatatgtgagcttttatgccctaaattatattattttagatttatatataaagtttaggaaagtaagcggaaactagaagtgctataaaaaactgagttacatattaaaaattcaagttattttttctggttttccagagtggccaaattattttcttatttaaaacctaggcaccctagagccatgtgtgtgcatgtgaactctactaaagtgagacactgacatgaacatagagtccatcagacctttatatcaagagcttggagtactcagagcatcgtatctcgttaatcttccagcattgatgtgctttagctcttgggaacagattactatacttattttaaagcaacagggcaaataaaaatagggatcttttggtattgaatgaccagcataactttagaaaatccaactctcttatccttcatttttacatcatagttacagtaacaggttaagattagcttttaacagattgttctaaatttctttaggtttcaaaacatattgctatgacatttaagtaatacttttaagactgtatgagacttagggccttggtttgtagagaatattcagttatttaagaaaagttcactttgattctatagtaaaataatgtacaggtgcaaatgtgtgatgttatttttggtttgtacttcaggtttgcaaacataccctaattttttacagaaagtatatggtagactctttattttaaaaaatgttcatagtctgggtctgtatgattttatttattttatttatttatttattattattattattattatactttaagttttagggtacatgtgcacaacgtgcaggtttgttacatatgtatacatgtgccatgttggtgtgctgcaaccattaacttgtcatttagcattaggtatatctcccaatgctatccctcccccctccccccaccccacaacagtccccagagtgtgatgttccccttcctgtgtccatgtgttctcattgttcaattcccacctatgagtgagaacatgcggtgtttggttttttgtccttgtgatagtttgctgagaatgatggtttccagcttcatccatgtccctacaaaggacatgaactcatcattttttatggctgcatagtattccatggcgtatatgtgccacattttcttaatccagtctatcattgttggacatttgggttggtcccaagtctttgctattgtgaatagtgccgcaataaacatacgtttgcatgtgtctttatagcagcatgttttataatcctttgggtatatacccagtaatgggatggctgggtcaaatggtatttctagttctagatccctgaggaaccaccacactgacttccacaatggttgaactagtttacagtcccaccaacagtgtaaaagtgttcctttttctccatatcctctccagcacctgttgtttcctgactttttaatgatcgccatactaactggtgtgagatggtatctcattgtggttttgatttgtatttctctgatggccaatgatgatgagcattttttcatgtgttttttggctccataaatgtcttcttttgagaagtgtctgttcatatccttcacccactttttgatggggttatttttttcttgtaaatttgtttgagttcattgtagattgtggatattagccctttgtcagatgagtagattgcaaaaattgtctcccattctgtgggttgcctgttcactctgatggtagtttcttttgctgtgcagaagctctttagtttaattagatcccatttgtcaattttggcttttgtggccattgcttttggtgtgttagacatgaagtccttgcccatgtctgtgtcctgaatggtattgcctaggttttcttctagggtttttatggttttaggtctaacatgtaagtctttaatccatcttgaattaatttttgtataaggtgtaaggaagggatccagtttcagctttctacatatagctagccagttttcccagcaccatttattaaatagggaatcctttccccattgcttgtttttgtcaggtttgtcaaagatcagatagttgtagatatgtggcattatttctcagggctctgttctgttccatcggtctatatctctgttatggcaccagtaccatgctgttttggttactgtagctttgtagtatagtttgaagtcaggtagcatgatgcctccagctttgttcttttggcttaggattgacttggcaatgcaggctcttttttggttccacatgaactgtaaagtagttttttccaattctgtgaagaaagtcattggtagcttgatggggatggcattgaacgtataaattaccttgggcagtatggccattttcacaatattgagtcttcctatccatcagcatggaatgttcttccatttgtttgtatcctcttttatttcattgagcagtggtttgtagttctccttgaagaggtccttcacatgccttgtaagttcgattcctaggtattttattctctttgaagcaattgtgaatgggagttcactcatgatttggctctctgtttgtccgttattggtgtataagaatgcttgtgatttttgcacattgattttgtatcctgagactttgctgaagttgcttatcagcttaaggagattttgggttgcgacgatggggttttctagatatacaatcatgtcatctgcaaacagggacaatttgacttccccttttcctaattgaataccctttatttccttttcctgcctgattgccctgaccagaacttccaacactatgttgaataggagtggtgagagagggcatccctgtcttgtgccagttttcaaagggaatgcttccagtttttgtccgttcagtatgatattggctgtgggtttgtcatagatagctcttattattttgagatacgtcccatcaatacctaatttcttgagaatttttagcatgaagggtcgttgaattttgtcaaaggctttttctgcatctattgagataatcatgtggtttttgtctttggttctgtttatatgctggattacgtttattgattttcgtatgttgaaccagccttgcatcccagggatgaagcccacttgatcatggtggataagctttttgatgtgttgctggattcggtttgccagtattttattgaggatttttgcatcaatgttcatcaaggatattggtctaaaattctctttttttgttgtgtctctgctaggctttggtatcaggatgatgctggcctcataaaatgagttagggaggattccctctttttctattgataggaatagtttcagaaggaatggtaccagttcctccttgtacctctggtagaattcggctgtgaatccatctggtcctggactctttttggttggtaagctattaattattgcctcaatttcagagcctgttattggactattcagagattcaacttcttcctggtttagttttgggagggtgtatgtgtccaggaatttatccatttcttctagattttctagtttatttgcatagaggtgtttatagtattctctgatgttagtttgtatttctatgggatcggtggtgatatcccctttatcattttttattgtgtctatttgattcatctcttttttcttctttattagtcttgctagcggtctatcaattttgttgatcttttcaaaaaaccagctcctggattcattgattttttgaagggtgttttgtgtctctatttccttcagttctgctccgatcttagttatttcttgccttctgctagcttttgaatgtgtttgctcttgcctctatattgcatttacaaaaaagtagattgtctcttcctccttgctactgcaaacaatgatgtgaggaacatcctggtactctccagggtatgtactgaggggtaggattgtagggtcatcaagcatacacaccctgatggtcactaaatcctgccagatttcttcctggaatggctgcaccagtctgcagcccaccagttgtgtaagaacactcctgctgccctacttctttgccaacattttatatgtttagactttctcttttttccaaactaatgggtgtaaagtggtatttaattttaagttgcatttctctgattactaatgaaattgagtacctctttatattactagttagttatttggctttttattgttgtgacgatttaagatttcatgttgatgtagatcttaattttgagttggtcaaacatatcactttttaaaatcttatactttataattttagggcccagggccacagagttattttctgacgttttgttttctgttagtcacatttacattcaggccttgattcatcttgtggtcacctttggttatatcagcatcgtttgaggtagcacattcacactctcaaatacagtgtgatagtttggtatgcactagagggccatgctgtatcatggattcattttgaaagagtatttaatgaaaaatataaaagaaggctattcatagcatattgccatttatgaaaatttaaaacacacacacatatatgtaaaacaacacttaatatttttcaaagaaacactccatatccaaagacagatgccagacaattaagtttttgcttatgaaggtttaggaggaaatgggggagtagtgataaagggggtaaaaaaataaaataagccaacagaggccttggacagactgataataatagtataccctgaattgaggagtatgattatccccacagtcagggtgaatataatttaggagagatgacctcctaataggttagtgatgagcaaagctggaaaaagttaattgaagaaaagtagaaatcaaatatttcagttgttctgaatcatgagtaagatgcctataaggaagaaaaattctcctaaatgactacatctggtcatgccttcttagcttttaaagtattttgtgatacacaggaatttatgtttttttcctgaggtgaagctctctgtaagaaggaaagcagatgtttctttttaagtgcttgtatacacctgccacaaggcagactgagtagttcatatggagagcaggctcgggttattttttatgttgcttgtgaaattaaaattcttttcctggcaagcataggtttataattaagtaatttatcataagagttcttttagctatatcaaaaatttgatgatatacagaagcaatatgtgagtggttacttagaaattagatgaatgagttatttcattggcatttatcatttgatgtgtaggtttttcctatttataacaaacattgaacactgactaattacctgcaactgaaagagggttaaaaaaaaaaagtcttagttgagaactgtattctcaacttattttcaacccaccagtgctcttgaagagtatgatgcactccgattaatagaagttgtgctctcttgggatcatgcttaattgtgttacaatataaagaagtcttcctccatggtatttatgggtatgaaaaaaaaagaagtctttctttgccagatatggattttgtacttccctcccttcaatttcatgtatactgttttttgtttttatttttctgattagttcccttggtatctgccctgccccatccccattcattttggtattcacatacccaataccatagtagcactttatatttactttgtttacgcctaattacagcctgcatattctagataaaacaaacagactcagccaggcacggtggctcatgcctgtaatcccagcactttgggagcccgaggtgggcggatcacgaggtcaggagatggagaccatcctggctaacaaggtgaaacaccatctctactaaaaatacaaaaaaattagccaggcgtggtggcgggcgcctggagtcccagctactcgggaggctgaggcaggagaatggcgtgaaccagggaggcagagcttgcatgagccaagatcgtgcctctctccagcctgggtgacagagtgagactccgtctcaaaaaaaaaaaaaaaaaaaaaaaaagaaacagactcagaaaggttaagtgatttttcgagggccatagagtaataagtagcagaaccagaatgtgaagccaagtctaactctaaagcccatctttttcatacttgactatcctatatttttcatggatattctacaaaatccatatttttatagagtatgatgtcttcattacgctcctcaatctttgaagaggattttaaccctgctctttggttcagctattgctgaatattgacacctttaagctgcaccatagaaaatttgtattcaggctccttttagagatgagtacttcgaactctctgctatccagttgctcaaaagtctgtttccaaatgtatttatagaatattgtgtgaatgacttattctccatccatttttctggattgtctgcattttagtttcaggccaagtcgtaccgtccaagagctatgtgcttaactcagctgcttttacctcttgcagaggtactttcttccttcctcctactccttttcgatattaaatcactggccttcaatgatggatgttatagcaaacagctgaataaaattcagtattctttctgtggttgagctttcattgaggagcccacctagtacaccacatcccatcgtttttgagaggacttacagatgaaattcttctcagatctcaaggtcaggaaacaacgattcatgtttttaaaatgcttattatgaatcttatatttgattgtattttcctctttactttggttgccaggaaggctagagccaaatttgcaagatcatctctaatagctgcaaaggaataaatgatatgtgtgtgtgtgtgccagtcttactcctggcattattttcttatctatgttcctgtttgatttcatctttcttaattatttattttgtcagtaatgaatgaattgtcataaactgccaaaaatcattatgctggtgatggatgcaaatatataaataacatgtgtaaggacaattaagctttcctgacttgatagttaaatctcattcctcctagaagtatcacatgtatacatccatcttcctcatttgtttttctcctttattttacttcctacacattttcagttgtttattatggatttctctcttgatgaatgcattcatacaattttagaattgttgagtatcaatataaaaagctattttttctgaaaattagtctccttataatttgtatttttcttaagttcatattttttagtaaaagtgtaaatttcataatttttattaaaacatttgcctccctaaagaaatttaactattttggttttttttttaatctgagaataggagtagggaaatttggagtctctaaggcatgccatgtagaagtttttgaacatttatatagaatggattgactttttctgcttgttcttctgtctgttgcctagtagatgtctctaactggatattcaaatgacacttcagaccatctgaaacttcacgtattatttccctcccaagtaaactagtcacccaaaccatatacacaacagtcagactcatttgctcacagctttaaagcaggttcttttccatttccactgctattacctattccaagtgccttgcacaactttgcctaaggagacactaagaattcttcattgaagagatgaagaaatgaatgaatacagggatgagttttcttcatttcattgcttctgtctagaccactggaaaaacgtatcttcctttattctgacctcttctaattcatgttctacaaagttatcaaaatgttattcttaaaatgcaaatcattcttaaaatgatatacaaacacacatcattccaggattcatttagtttagtgccaaggcctttcatgctaagttccctgcatctttctggtcttacctcccaccatgtctctttactgactttgttgcatcatcacgtggctgcatactccatttcctcccatgtgctgttcattctgcagaacatctcactgaagctttacctggagaactctactcactttgcctgtcggattcagatgtctttcctacttgttctcatagacatttatgtacagtctcgtgactcttttcatattaaactgttatcatgactgacttacttatctaggggctttctcttaatcaacacaggttctttattcctggatggtatccaacattccctgaataaccagtgattgtttattggctgtttgactgaatatagaatagaataagtctgtagcttatagtccattctaaccactcattcttttcataacttttattgagtgcttactatgtgccagcttttgtttaagagattggcaatactatagtgaacaaaatagtacctgcccaggcaattaaaaagtaagcaattagacatacaatgttgggtagcattatgtgtatattaatccagtttcactctgctgataaagacatacctgagactgggtagaaaaagaggtttaattggacttacagttctgcatggctcgggaggcctaagaaccatggtgggagatgaaaggcacttcttacatggcagtggcaagaggaaaaacgaggatgatgcaaaagtggaaacccctgataaacccatcagatctcgtgagacttattcactaccatgagaacagtatgggggaaactgccccaatggattcagattatctcccaccaggtccctcccacaacacatgggaattatgggagtacaattcaagatgagatttgggtggggatacagagctaaaccatatcacagtgttaggaagaaaataaagagggataaggaaattctagagcatatgctcaagcaaggcatatctaaagagggagcctttgagcagagacctgaatgcaatgagagacaagttgtgtccatggcggtgttgctggggaggtggttctgggcagagagaacagcatttctgtgctcctattatgtaccaggctctgttctaggggttctggagacagcaatggagaaggttgttaaacatcagcattgtttattatttaaccatgcagtctgttctttttcaatattatgtcatagttcaaaactcctcctttctttaattgctaggtttaacgaagttgaaaaaccctaacttgggaaagtctctttgttctccccagctgctaatcacttcctactctttgttgtggaagagaacacataaagtcttattatttagaggcccctaacagaataggatactggtcctggggacagatccccaactatctgaatttaatcatgatgctcagggatgtgtgaaagtgtcttaggtgttcatgtctttgacgtttgacctaggttatagatgtctgtgaaattctgtcaccataattagatatagatactactgatttccttttcccagtcttccaacccagcctatgaccctgagtaaaaccttcttaaattcttttacttcagtagcacacaaaaaatcataattttggatcctgttccttgctctgtcacctgcttgctgcagttaagtctgctctgtggcagttttccatttgcaagcagggcacccttccagttaagttgtaaaattttatgtttaagtaagcccctgtgcccttgaagaataggagctacaggaatgtagagtccaaagagaaaaaaaaagaaagagcattcctaagaaaactgtgtaaatttgcaaattcgttttcttctggtggcagctgacaggtggaatgacaacccaaccaagtaacactaggcccttgtgataggagggaacttaatgctgcggttgttctgcttagatggaattgtgtggggctgtgccaatgcctgtattgagaaagcccagtcgagcagaagagtttttggtttctgcatttagaactgccgaacaactgaggaaaaccgattaaatctggaaggtggcagctcacttgacaggcttctccaggcacctttgaggagaatcaaagataaataaacacattttatgagaggagtatggggtgagagggagtgtttggacaagagttaaaatttcaaagggagggggaagttctttttgacttttctcctgattagactcttgcctcatgtctttgttaatgtacaaattagagtttgtccctgtctacatgggtaagcttgatgggaaaggaagaagatagaagtatattttcaaagacctcaactatagaaggtagaaggaaactgatcaaatatgaatttctttattagaaaaaagtggctttaaaaactattttataagtcatattggatactcatgtgcctgtggaacatgcaaaaactctggcctgttgcacagaggtttgattttgaaactgtctaattttatttatttaaatttttttagagacagggtctcactgtgttgcccaggctcttgaactcctgatctcaagcaatcctcctgtctcagcctcccaaagtgctgagattacaagcatgagccactgcacgtggcccaaagtctgtaatttttttcagtaaagattgatggactttcattacggcctggtctagtgtgcagtgagttgccttgaggtcaggtagtacttgacaccccttatttactgggtatggaccctgttctctcatccttccattgtgctttactctttttttctccgtgaacaatttttacttgagcttgacttacctcaaaggggctatgaatattgaattggctaaaaataattcataacattctagatatatggagccttagagatcattgccctcttccccattttgcaaagagtaaataaagtgaagcccaaaagtgttaaattgctgctggcctaggggcattcagctaccaaatatgtatgcaggaactccacccagatcctgaccacactattagtctgttctcacctgctaatgaagacatacctgagactggtaatttataaaggaaagaggtttaattgactcacagttctgcagggctgtggaggcctcaggaaacttacagtcatggcagaaggggaagcaaatatgtccttcttcacatggtggcaggagagagaagaatgagctaaatggggaaaagccccttataaaaccatcagatctcgtgacaactcactcagtatcacaagaacagcagcatgttgtaaccacctccaagattcaattacctcccaccaggtccctctcatgacacatggggataaggggaactgtaattcaaggtaagatttgggtggggcacggccaaaactttatcattccacccctggcccttcccaaatctcatgccctcatacttcaaaacataatcatgccattccaaaagtctggcaaagtcttaactcattccagcattaactcaaaagtccaagtccaaagtctcatccgagacaaagtaagtcccttctgcctaagcctgtaaaatcaaaaacaagttagttactcctagatacagtgggggtacaggcattgggtaaatacacccattccagatgggagaaattggctaaaataaaggggctacaggccccatgcaagtccaaaatccagtaagacagtcaaatcttaaagttccgaaatgatctcctttgactccgtgtctcatgtctaggtcacactgatgcaagaggtgggcttccatggccttgggcagctccacccctgtggctttacagggtacagcctccctcccaggtgttttcacaggctggtgttgagtgtctgtggcttttccaggtgcacggtgcaagctgtcagtggatctgcctttctcaggtctggaggacagtggccctcttctcacagctccaccaggcagtgccccagtagggactctctgagggggctccaacccgacatttcccttctgcactgccctagcagaggttctttatgagggctccacctctacattagacttctgcctggacatccaagtgtttccatacatcctctgaaatctaagtggaggttcccaaaccccaattcttgtcttctgtgcatccataggtccaacaccacatggaagctgccaaggcttgggacttgcactctctgaagcaatggcctgaaatgtaccttggccccttttaaccatggctggaacgaagcagctgggacacagggcaccatgtcccaaggctgcatagagcaaggaggccctgggcttggtccacaaaaccatttttccctcctaggcctctgggcctgtgatgggtggggctgccatgaagacctctgacatgccctggagacattttctccattgtcttggcaagtaacatttgactccttgctacttaagcaaatttctgtagtctgcttgaatttctcctcagaaaatgggtttttcttttctattgcaattttttaaaactttatgctttgcatcctttttaaacatagattccaatgccaaaccatctctctcaagttcagggttccccagatctctagggcaggggcaaaattccaccagtctgttttctaaagcataacaagagtcaactttgctccatttcccaaaagttcctcatctttgtctgagaccacctctacctggacttcattgtccatatcactatcagcattttggtcaaagccattcaacaagtctctaggaagtttcaaactttcccacatcttcctgtcttctgagccctctaagtctctaggaagttccaaaatatcctacgtttttctttcttcttctgagccctccaaactgttccaaaccctgcttgttaccacttccaaagttgcttccacattcttgggtatccttatagcagcaccccactctactggtaccagtttactatattagtctgttcttatgctgctaataaagacacacccaagagtgggtaatttatgaaggaaagaggtttagttgactcacagttccacagggctgtggaggcctcaggaaatcatgacagaaggggaagcaaacatgtccttcttcacatggcagcagaagagacaagaatgaacaaaatgaggaaaaagccccttataaaaccatcagatcatgtgagaactcactatcagaagaacagcatgggggtaaccacccccatgatgcagttacctcccactgggtccctcccatgacacatggggattatgtgaactacaagaaaagatttgggtgggcacacagccaaaccagtcaacccccacaccaatgcatgtcttttgagttgcttagagctcaatattgcataagtggactatagcagtttactttattgacttataaaacataattaataaaataattaaatgtattccctgtataattcaaaacctcaggagttatcataatagtttcaatctctttttctatcatacctcttatgagaaactagaaaataaattaccactttgagtttcagtttgtgtttattttcttgccatgaagagtatgatgataaaaaaacataaaatgaagtggcccagaggcaggcaaccagaaggtgaggaacaaaaccaaaagtaatagattattagatgccagtaactaagattctaaattattactcttacgaatatagtgtgggttgctttaactatttcgttataatgtttatgtctgcacccatttctcatttctttttcctagtgtgcaaagttaatttaaagtgttagtacaaattgaggaagggaagtctctccagatttcattagaggatagactgaataagaacatgtcctacccgcaaggacaaaggagaagaaaatatattcttgactgtttcagaccacttcagataaggaggagacaatttaaaaaattaatttaaaaaaacacattaggatcaaataacccctccaaagaaaggtgttctatggatgagaaatgtaattactgctgtaaaaatgtagggaattttgcacgtttaatatagtttgtctcctattagaagcactagttggcatttttcagtattagggttgtggcttgccaggcccaccctcctgctgtgtttgtttcagggaatagaacttacccagtcgcaggtttcagaagagctgaggtaacctccttcaatgtgacacaagtactgtttatgttggagacaaatcccagaaactcaaggtaacaacgtacacagagtgagagagtatatgcaagagatttttatttggcatttttactgctaacagtctacagaagttttagtatttagtgccagttcaggcttaaggggtagtttctatttctgtgtgattttgaaaggtttaaagaatcagcaaattattatataatagataataaagaataaagattctggcttctatggaagcttgcaaagatatgagggagggcaaacaactgcttctacgtgttttgttttgttttaagaactcaaaaaagcatggtaggttctttgagcaaggccttagttgtcaaaagtttctgaagccctcaaaccaataaatagtattattactaattaaaagagcagataaactgagaaacaaagcacttagacctagggtgacatggtgagaccaaaactgaattctgtgtcttaaaattcagttatctaatctccccacttcattgcatattctactagcagtcattcagtaaagtacctttcatcactgcaggagtctctctgaacacagtggctttggaatagggttatctccagacattgttgacatcatgtctctgctcacataccaattgagtgaatattggcccacatgattcttgtaagtggattacaagaaatccacgatagacttcattcacttttgatgaaaccaagaactttccctcttgagctacctaatgagatactgttatttgtttattatgcagggtacaggttggggcttgttagctctctgaattcttaagcactcaactgaggaaatcaaatgcatgattttactatgcctgcacaggagttggagaaattcataaagtttatactttactagttttcttaagaatacagatgtaaataggctgttaagtctgcccaggcagaactgttgtttcagatgaaacttaatgaccacaccctcccaccccaatggagattgaaacagttggagaaactttagtttgaaaaatatttactttaaactaaactccaggaatcttttttttttttttccccttggtgagaaagatattctcaggtctattcggagatagcaatatctttaaaatcatgcaagaaacaaaatttcggagcttctcagtggttaggaatagcttcggacaatttacctaattgggcttcagtttcctgacctgtataaaacaagaggattggtaaatgctctccaacattgcttgaagctcctaggttctctggttactttgttatcgtcataaaatgataatttaaaaattgatgtatatgcatgattttatgtatgtatgttatatatgtatgattgattatacttgcctatgtatggaaaatttcaggttgttaataagaaactcgtttcttttggagaggaggactatgggcctgggggtcaggatgggagaattttgcattattttatactttctgtttgcttgttttttactaagtatgcattgtttaaagattttaaaaatagattggttttgttattattttaaaaggatgaaaggaagactttcaaattattgtaaaatctatacccaggataataataattggaatttcatttcagactccaagtttaaagtatttgtaattataagtagacttttgcttttattatagtaagaaaagtcttttaaattctcttcttcaatgaaagcaaccacttttgtttggtgaaacaagcagcatttacaagcacagaaacaaggtttagcaatattagtgacaggattatataccttctatttattgggtcctctaaaagatcatcttcctttgatttgcaactatgggaatgaaatagaagtgggaaaaattagcttttaaaccaattagttagtaatgactagtgccaagtttaaagtgtttcagagtgttattgcggtgttttaaatgtaaaacactagctccctcttaatctttttagaagataaaactgcaggaaatgaaaaagtggtcagttgaaacagcagaaggcattttagaggctgcatatagtaactggacttggattttggtttgagcattcgttttgttctattttcctatttttacaaatatttgtattaggttttgagaaactataagaacccagaaactagatgtttctagcttgacatatttgtggggttctttttatttttatcatttctacttttgtttcttacttaaaaaaatgaacttaaggaaatatacagaaaaaataactcaacaatcattttcatttaaaaaaaattagagtactttctagcatggttaatatatcattataatcaatatgaagtagatgtggtaggtttttttatttccagttgttctgtcaaaccttgaacattttgccctatctggcacaatgttttctagccttttccatattcaacaatgtcaagtaagtaaaagttaatttaaaatgaacttcagtgtttgtgtcacattggagttgttaaagttctcctttgttctttccaggtttgcattgcctctggctaaatttatttgtatttccattccatgcagggtatggtagcactgtgattcagcttacttagtacttcattggaacgttgggttatttatgctaaagtcaataatctcatagtgatgatgatgatgataaccattgctgtcacttattgagtccttacttttggtagatactacattagacttttaaaaaactcatttaatgggtattcattgaacaccttttatgccccaggcattgatttaggagccaaatacataatagttaacaagacaaagtcctggcccataaatatattgtttctaatccacataaaaccttgaaaggcaggtattgtcttaattttatagatgagaaaactgaggctacagaaggagaacaaagttttcagcattttatagcctgtgagtgaccagtctatttaattccagtctgtactttgctctgttctcctgcctcaagatagatcagtattatttccctcttcattaagatgtttataaacattcaggactggtataaacatgcttggctatgacacagttaagctgacagggatataggatgtgaagtctataaacaattattccttttttaccttagtgctccatgagagctagaagagacgctaaaacctagtacttttcacatcaaaaaacgtaaaatactaaggaataaattgaacccccaaaagtataagatttgcacactgaaaattataaaacattgttgaaagaaattaaagaagcctaaataaatggaaagatgtcatatattcatgaatcaggagacttaatattgttaagatggaaatactatctacgtggatctacatagtcaacaaaattcctatcaaaaccttaaccaatactaaaattcactgggatccagaatagccataacaatcttcaaacaatcttttaaagaagaagaaagttggaagactcatattttccagttttaatactcagtataaaactatagtaatccaaacagtgtggtcctagcataggataaaaatacagatccatgaattataaatgagagttgggaagtaaactttttcatttttgattaattgaatttttacaagggtgccaagacaattcactggagagtagtctcttcaacacataatactgggacaatttacagccacatacaaaagaacgaagttgaattggtactttacagaacacatcaaatggatcagacacctaaatgtatgatctaaaactataaaactcttagaaagaggccatagagcacaatctttgtgaccttgaaagacagtccacagaaaagaagaaagtaattgcaaatcttacatatgataagggtctagtatccagaaaatatggagaacccttataatataccaatagaaagacaaataattaaaagtagattaataattttaatagattttttccaaagatgatgtgcaaatggccaataagcacatgaaaatatgctcaacagcatcagtcattgatggaatacaagtcaaaaccataataagataccactttttaccactaggatggctatgataaaaaagatagacaataacaagtgttggtaagaatataaaaaaaatgggaactcacattcctcaaaaagttaaacatagagttaccataggacctggcaattccacacctaggtatatacccaagagaactgaaaatatgtttacacaaaactttgtacataaatatccatagcagcattattcataatagtcagaaagtggaaacacctaaatgtctctcaactgatgaatggataaacaaaatgtggtatatttgtacagtgaaatattatttagtaatgaaaggaataaagtagtgatacatgcgtcaacatggatgaacgttctgttaagtgacagaggctaatcacaaatagctagatgttgtataattccttttatacaaaatgttcagaataggcaaattcatagagacagaagagagataagagattgccaggatctagagagaggcaggaatgggaagggacagtgactactaatgagtatcgggtttcttttcagagtaatgaaaatgttctggaattagatattggtgatggttataaaactctgtgagcactctaaaaacactgaattatatactttaaaagggcgaattttatgatatgtgagtaatatctcaataaaattgttacgtatatattttttaaacctattaatttggcttcggtggtttggatttagtccaccacttcaattatctgtttgtgtctgggttattgcaattcaagtacaatatagtctcaacctttattgtctatgaggatcttcaattttcattattttatcaatctgcttgtctattgccttactttataccagctagacttattatatacaggcaaaaactgatacagagcaatatgatatattttcttcttgattccttttttaaaaacttaatgttatattacttttcaaaccaagagtggcatattgttgtaattatatcattaaaaaatgtgtttattttcaagagtatggatttgatttagaaactgcttttcctgcattctctattattcatggcatttgatgaccacacacttgaagtgctccctggccagagcgtaagagtcttgggggtggggtcagtatagaaatgattaatggtttgttaaaatgcaggcaagttgaatatgacttttataatgtggctgtgagaccagcttatggtatgaattcatacatgtctctctcttttgtaaacatgttatcgaagtaggttttatttcttgaatgctctggcctggtgctaatgagatgtgtgagtgtcctacccaaagcattatgtaacaggaagcaaagttttctgagggaaataagaagcttactagaaagagaagataaaatctttgctggggaatggttcttttccattagcattcccagtgcatttctccagaagtgtgcctaggaatcctctgctgtagttgctagataatattccctctttttcagggtgattggagaaagaaagcagttatttggggcctggagtatatagatagcaaggagccatggttctgaatgtggtgattggcccaggcattcttgctagtgatggaaatagagggctgaacaggaaagagtgggcagcagtacttgataacatgaggcactggtaataccaacttcatgtctggtcttcccatttaaaatggattatattttagcctctcgtcagattgaatgctaagtatccctacagtcaatgcctgcaaaatctttggcgtacttacttcaaccaaaacttaaactcaaagaggaatatagtgtaaactttggtttaactgaacatagaaagatcacacagagagccctggttttattgcttggaaacatgatgagatgtaagtactgtcaatagattggagactctaggcccaaatttcactgaagttcataaatgtctgctaatttcagggaccatcatacttaggagctagtatactaagaaattggaaagtaagtttaacatgtcttttgtgaaaggtggaaatttaagatagggacacagctgtctgcaagggacagtaggcttgttttttgaggcactctgtggcattcaagatcctaggggatttgaaactcagagaatggtacagtgaacataagaggggtggaaaaaagtggaggatgaagtggttatctgtgtcaaaaggaactgaaaggtgttcatactgttccacaatcccctcttcttaccattattagttaggtaaagagacaaaactgaatggcttccctttctccatctgtctcaagattgtttcctgccttggttgaaaggaaaagagggagggagcaaagtggcattacttactttggtctctctttttagatctttgggtcccaaaagtcttattggtgagaatatctggtttcataagcagaagtgggaaaaataattattactacttattgaacataagaactgtgctaaacaccctaataacattatttaatccgtacaacttttttgtataagcatttatctataagttaatacatgtgaagcacttagaacttagaatgagagcccattaaatgttaatacccattttggagataagagaactataccttagcattggtagaattttaatacatgattgttaaactcaaaagcccatgatctattatgcgatactgtggctctcttccttaagaactcagcttcctttacaaaaatcttccctgatattctcctctatatgcatttagaatcatacctgtttttcaattctatattttgactaattccaggttgtcagtcctaaatcctcttactctccctgcacttatccctgaggaagttcattcttcagattatcaaggtctggaccaaatttatttagtgagaatgtggaatttttcttacaagattttaaaatgacaagtaagataattacatgaaaggatctgtctaggctctttttgcattgtagggggtggaccaagtaacctttggatcacttccacttgtataattcaccatttcggcaggacagtaacatttcaggccaaagttcaacttttttttattattaaattcttttattgtcgccaggaaactagagaaaatgaattcttcacagtatgcttgtgcatgcaacttgaaacggtttgcacactaaatgaaattaaatgaaagacagctgtttgagaaagagctgtcagaaactgattgggttctattagagaagaatagaggccaggaataagttttcagaaacaggatatcagtggttttaaaagcaagcaaatttatacacacaaaagctctcatgtggttgtgctgttacatgtcttttcagttcatccatcttaaattatttgcttttggtgagtaggtgtctgctttcaaggctttctttcacatattgaatgtgtgacagttctctcttttctgagaagtaaatacaacacaaccccactacaataccatcctacgtactttggttttgggtaaactgaaaatccagtaatgttcaccaaactacttcctttgtccagtacctctctgttcctgccaaaatacaaagggaaaggaccatcttgggcaggttgccagaagtgccacctgggtctcctgaaatggctgtcagcaagaagggagcaattacatcccataacagactcaaagcagatggtcacctgcggtgataagtattacattattaagcctttgatttgtgattgtactttgtgctttccaggcactgaagttatgttacttgtgcgatgttcctctctgttcccctagacctcattgctcgttgtttggccatgtgttcccatggcttatcctccaaaaagctttattctgcaatcttctaactctcctgcaagaggctagctcataataggatctctgccaggccctccagcagtaggtatggtgttattacatggagttacctttaaaggaatttttaaaagcctttggggctttactgtggaagcataacttagtcacagtataacctcatataggaaattcagttagtgttcagagttaggagtcctagtataacattgcactcattgagatttagtctctggagtctcttcttccattgaatttttatgttttcagccctatttaacaatggtcttccataatgcattgaggctcaatctcaactgtcctcctttgagatctcgcttgccatcccctccacaccttctttattttctgaagatttagaatacaaatttatagtctctcctatagctgaagttaggagtcacttgattcatagggtgcctagctccctggactaagatagatggcagaatgtgcgtagagatacatgatgacacagtcacaaatctaattcttcatgcagatagtctttcaaaattcttagcaaattttaatttttaatattgtgagcctcagctgtagtaattcagatttaattatcatgtgatcatgctggggtgattgtttttagtgcagacataggaaatcaaagttggcagctgggctgcagctgtgccccagctggttttatctgagttgaattcagagggagaagtggcagcatgctcaccagctccagaagatagtcttctttggtcatacaaagcaatacctgctagatgctttttgagctagtgcaattaacacccaattagtgagacttcactataaaggtattaagaacatagtccatgtgtagtggacatgtcatcattgtttctttacaaattaaataaacttgctacgtagaaaatttactttatataattagacagtgttttccctaaattacaaaaacatgctcttaaatttggctgtcttaaagttctctgaacttgtaagattttgacctaccatatctaatttttgcctgaaaatattttatagatgctgagtacaatagcatatttatgtttaaaaatacgaaattggtttattgattttttaaattaattcttactaggaatttacatcagctacttctggctttcctgcaggaaaagaattcttgcagcttagattaatcaatattgtccctattgtaaaagacactatattgaaagctgtaatataattttcaccatgcataataacaaagagtgtctaatatccataattattaagaattttacccatcgaagaaaacaactcataagaaaaatagctaagagttttgaacaagtagttcatagatgaagaattataatttgcaaatcataaagtcactaatatttaaagaaatgcacattttagtatgttctacaagaaggctcttcctcatgcattaaactctcaatgtaaatgtgatacttaatgaggctggtgcaaataaggaaaggttccctcataccaggcattcctacaaattctcttgggaatgagttctcacagtacgacttctggttgaaggctttcccatatacaacatattcatatgatctgtgcaacatgaattctctgctttatgattagagctgattactgtgagaaggctttatgactttcaggaaacaaataagtttttttttccatatatgaatgctctgatgcatactgagaactgattatctggataccagggtgactgaatggagcccttatcacagtcactgcattgataggctttatcttaagtatgagcatgctgggtttcttcatatttgacatttgaaggcttcctcacagttagttcacatataggtttctctcctgtatgaatttagtaacgtagttgaagatgtgatttcttagcaaaagacttctcacagatgccgcattcatgaggtttctctgaagtatgaatcttctgatgagtaggcaactctgatttctgtctgaaggcccaccaacattcagtacaaacaaagagtttctctctagtatgaatattttctgggatgaaagaagacttaatcttttggtgagagttttccacactgaatacatatatatggtttttctcctgtgtgaactcaactgtgccctaggagttgtggtatcaggcttgttttcttattttattctaaatgcttgtgatcattgctagtgacagccttctagtcctgagccacagccaacccttcagcctcactgaacaatgtgattggtactagattatatatatttttgttttatatttgaatatattaaggtgaagttggattattttctgtcacataattgaaatggttccacattacattattggaaaatcatttgttttatactgacccattacctgatattttaccattgaatggcatttttagtatctttgtgtgattgtctttcaattgaagtttttgagggatatatgcagcattttgtcattaaatttgtgcagatacatatgatggtttctctgttatattttataatatataaaacgtgctaaaattgttacagcaagaatatttgttttcttaatcttgttactctcattgtgataagtttcttattatcaaaagtggcctaaatagttatcaacttatgtttcattgtcatgggtttaatgtacaaatagagatattattaatagtatttcccaagtctttaatatttcatttttattggatgtgagatcatctgccagagataattaatttcatattatttgtgtaagtattatttattgagtgttaatacatagcagatactgtgaagaatattttatgtaccatctcatttaatcatcttagtaatttttagtatgaaactaggttttcttaaaaagtcaggaaacaacaggtgctggagaggatgtggagaaataggaacacttttacactgttggtgggactgtaaactagttcaaccattgtggaagtcagtgtggcgattcctcagggatctagaactagaaataccatttgacccagccatcccattactgggtatatacccaaatgactataactcatgctgctataaagacacatgcacacgtatgtttattgtggcattattcacaatagcaaagacttggaaccaacccaaatgtccaacaatgatagactggattaagaaaatgtggcacatatacaccatggaatactatgcagccataaaaaatgatgagttcgtgtcctttgtagggacatggatgaaattggaaatcatcattctcagtaaactatcacaagaacaaaaaaccaaacacggcatattctcactcataggtgggaattgaacaatgagatcacatggacacaggaaggggaacatcacactctggggactgttgtggggtggggggaggggggagggatagcattgggagatatacctaatgctagatgacgagttagtgggtgcagcgcaccagcatggcacatgtatacatatgtaactaacctgcacaatgtgcacatgtaccctaaaacttaaagtataaaaaaaaaaaaaaaaaaagacaccaccattcagaacacaaaaagctacagaaggtccaggctactgaaaagcatcaagaccaagctgttgtaagtcaaactgcttttatgattgcattctttgatgaagacaatcccagaaaaagaaggtcatattctttaactcaaagtgcgggaatcttgtgtcagggaactacatattcaacaccacatacaaaacttgagaaagcaaagtcttcaacagcagatgccaaagtggtttctttgtctttacagactagctctgtgcatcacagagtggggcatggtgttccacatgggaaactgttaaaacagaaatcagaggagccatcggtgtcaatacccttcctacaaactgcattattaagaggttcagggagtcttgggcacagaccaagccaggagatggataaaatgttaaaaaatcaagcaacttctgctacttctgaaaaggataatgatgatgaccaaagtgacaagggtacttataccattgagttagagaatcccaacagtgaggaagtggaagcaagaaaaatgattcacaaggtaaataattgaaatttgagtgtgatcttagttgttgtgtggtgtatttgactggtggaaattattggagagtcagcatgagatgttgtcatgcagtcagtggtatgtgaattttagggttttattagggaactgcaagactaacagtaagaccaacatgctttgtgattttatttgctgatattctgaatttacctgagtttcatacataaagctctgtacatttaaaaggttaaaaaaaaaaaaaaaaagaaactaggttttcaagttggtaatggtttcagactgtctatgtaaagcataagtagcatgatttgaagtgattcattcaaaaaatgtataaaatcagagtaatagaagctaaattactcaaatcttgctcagatataaaattttttttcagctttcataggaatctgcccttcgattagtgagaaaatacggtcttctgttgaagcagagaatttgacagtcatgacattatattgtgaacctttaagttttactgctttattttctgtaaattactacatttctatagtaatttcgcagtgtaaatgctgaatgaatgtgattagctatatttgcaggcttagagcatctgtgaatacttcctggtttttggttagttgtgtttattcctagttctatgtcctattgaattggactttgcttatttaaagaaaagtctataaagctacaggcaagaaaagttggaatttcttccttggggaaatctcaaatgtagagttttaagtaaatattaaggttcaaaatgggcaatataatgagcacatttgaggaatttgtaagtatttatgtaacacttcatgtttacaaaatgttttacagccatattcattaatttacataagtcccttggaaggtaacaatgttattacatgtgttttattaagcaagacaggtaaaatttaggcaaattaagtggcagaaaggaagagacattaaaacatttattctgtgacttgcgcctatatcatagagcgtgctcctgcattagggaaataaagaaataaaatgcttctcttttgttatagacttgatcatggtgcctatttgggtaattgtttatatatattcatatagttttatatattttttattttttgattatgagacacaaaggccttccaacacaaatttcaatgtatgaaatatctcaacttaatagctgaaggataagatcctgggttataaattctccattaaatgttgcagttatcatgatcaacagattggtgaatatgtctggtggctgctcagtattggtctagatagaatatactatgggaccaaaaaagatatgaccgtggagagctcactttggtggccacacactgcctgcaggctgcttgttctctgccactctgttttttgggaggactttcctttccctctcatagaatagcaaatttctgctaaaaagtaataaatttgctcaaaatatcaaaaaggtacgattagaatatcttccatagtaaaagagattaaaaataacctagactcttgcattagaaagcagagggagacatgacaaattattgcattcaattaacttttcttttacttactgagtgcccagaaattgctttaacaccctgaggtgtgaccataaggtaatgaggagtgatttttaaaaataaatataccataaggtacactgtttaaatgagtgctattcttcaatgtagccactctttacactaatccaacgatgctgtcattgcaagaaatatttttagaacttgtcctttcgaattgccgttagaagccatttatggactatagaagaaaacagtctcacattgacttaaagtcgcactacattttttaaatcaacccctcccctgcaaagaaatttattacccaaatagattactgaccttttcactaacctttgttctgcatttttttcttttcaaaatcagttctataatttaaaaaataacaatttgccatcaacaaggatatttatttcctttttattttgaaaagagttattaaaaaatctatatcagaaaacagtagacaaaatagtagtttccatatatccttcacccagttccctctaatgttaacatctaatataagtatagtacagttaccaaaatcaggaaattaacaccaataaaatactatttggtaatcagtagacatcatttaaatttctccaattttccccactaatatcctttttctgcttcaggatctaatccagcatcccacattgcatttagttgtcatgactccttatgctgttccaacctgtgacagttctaatgaggacatttaaaggaagtgtgcccctcgcccaccaaaaggaagaaagagccatagactctgaatgtaattccaaaaatatctttgtctctgtagctgtcttgtcaactatgtcttttatttattggattttttgtaacctgtgtaccaaatttatgcagattgcagcaataagaagaagggtaagatgtgcttgggcacaaaggagttgtgaggacaacacatctgtccatagccattgtgcaggtgtattttgagctctgcggatttttttataatgctttcacatttggttcaaaatattttaaaatcttcattatgatttctcatttgatttgatcctcatttataatagctcgtgtgtgtgttgtgtgcatgtgtatgtgtgtgcacatgtgtgtgtgtgtgttcattcatttcaggaactttatctgttaaaattctttgaggccagtgtttaaagtatgttcttcaagggaagattcctatttgctcccatcagatgcttgtgaacacttcaaatgcaggggaaccgccaaacaagttctttttttttttattgagacaaagtctcactctgtcacccaggctggagtgcagttgtgcgatcatggctcactgcagcctcgacctccctggcctcaggtaatgctcccacctcagtctccccacgtacaggcacgtgccactcactaatttttctaatttttttttgtagagacagggtgtcaccatgttgtccatgtagctgagactataggcacgtgccaccgtactcaactaatttttccgatttttttgtagagacagggtctcaccatgttgtccaggctgcagttcttgatgttaatttctttttttttttttacaactattttatcatttatttattttttattttattttattttattattattatactttaagttttagggtacatgtgcacaatgtgcaggttagttacatatgtatacatgtgccatgctggtgtgctgcacccattaactcgtcatttagcattaggtatatctcctaaagctatcccacccccctccccccaccccacaacagtccccagagtgtgacgttccccttcatgtgtccatgtggtctcattgttcaattcccacctatgagtgagaatatgcggtgtttggttttttgttcttgcgattgtttactgagaatgatgatttccaatttcatccatgtccctacaaaggacacgaactcatcattttttatggctgcatagtattccatggtgtatatgtgccacattttcttaatccagtctatcattgttggacatttgggttggtcccaagtctttgctattgtgaatattgccgcaataaacatacgtgtgcatgtgtctttatagcagcatgatttatagtcctttgggtatatacccagtaatgggatggctgggtcaaatggtatttctagttctagatccctgaggaatcgccacactgacttccacaatggttgaactagtttacagtcccaccaacagtgtaaaagtgttcctatttctccacatcctctccagcacctgttgtttcctgactttttaatgattgtcattctaactggtgtgagctggtatctcattgtggttttgatttgcatttctctgatggccagtgatggtgagcgttttttcatgtgttttttggctgcataaatgtcttcttttgagaagtgtctgttcatgtccttcacccactttttgatggggttgtttgtttttttcttgtaaatttgtttgagttcattgtagattctggatattagccctttgtcagatgagtaggttgtgaaaattttctcctattttgtaggttgcctgttcactctgatggtagtttcttttgctgtgcagaagctctttagtttaattagatcccatttgtcaattttggcttttgttgccttgatgttaatttctaagctgcaggtttttaggccatataagtggtttaagtttctagccctaaatcacattaggcaggttttagatagaaattctcattagggcagagatctttgttacccagtgcctggaaaggtgcctaacaaaaactggccctcaatacatattcattgaatgaaaaaatgaatgaatggggaagacccttgtcccctgccttttttttcctgatatattcagaaccacatctgagaaggacaggtcttctgcttcaaggtgggtttttttttcttagtttgccaactgagggtgtcaccctttgggagcctggaagtctcaactttaagtaagggtcctcatttaatctcttgtcctgcttgggcccgggctctgtctgctatcctcccaactctcttgccatgtgcccatttagaacccaggctctagttcattaaggattggcaactgctctcaggaaagaatcctcccaagtttttttccttctgagaaatgttatttttttcagttgtttctggcttacatttatttctgttactctctggctgaaccatgcttaaaaagacatattttatattttaggtgtgatgtactagtcttctgtcatattgctaggagtgtgattctctgtaacaatttctttagagaaggtataatgtaaagtaaaaattaatatggaggaatgggttatagggaagttagtgtccctgagatcatgaaattatctctttacgcactggaagttatttttttctctcgtgtttcaagttagaactttttattatgtcatagattaatcacactgctgtcacttattgagtgactcttgtgcatcaggcattttacatatattatttctaatcatcataaaagctttgcaaccagacttagcagctttattgcaaaagtgaagaacctgaaagccagagcatttatgaaacttttccaattattccaggcagtgagaaattgtagtagacatgttttatggcacctgcttgccatgcttctaagaggcgttattcctccttgttgaggagtaacagccctggtttgtaccatatgaccccatccccatcttctagtcaagtgatctaaggatccacaatccttagcttggtaagtgccctcttgctaacctaaaaacgaaaaagtcaacagcttgctttatagggaattccagaagcatttccataaacttattaagccaatgatcacccttattcctactatcatttagtattgttatagtagcactagacaaaggagtcttacaagaaaaagaaattagaaataaaaaaaactagaaaggaggcatattaactataccttctaagtaatatgattgtatatttggaaaaaccaagtgattcaactaaaaaatttacaaaaataaaagaattcataatgacagattctgagaaagaagaacattgcggtgggactagaccaatttttgtaaaatgtattaagctacaataacttaaagactgtggtgctggtatagatagttaaatggaaaaaaatgggacatccaaaaataaatgtggaaggagtataagatatatatacatatcttatatatatatatttcacataagataatgttggcattgcatatcacaataaacactggagcattcaataaatcttaccattaggcaaagaaatggagttgaatttatatcttaagccttatccaaaaataaatccttgggggcaacaatgatttaaatgtgaaaaataaaatcaaaaaagtattggaagaatatctaaggttatttaagataatttctacattagaaagtcttttcaagtataatataaagcacagaagccataagataactaactttaaatactaaaaaacaaagtttatgcataacaagaaaatccattgtaagcaaagtcaaatgacaaatgaaaatctggagaagatatttcacatgtatcacaaaccaagactattttccctattgaatagagagcatctacaaataaacaagaaagcaatgaccagcgatgggtaaaggataaggacagatcacagaaaagtaagcacaagtgcttttaaaatttaagaaaaagatatcagacttccctcctgatgaaaattaaatggaaaacatgatatatcatattattgaagataaagaagcttgatcaaaactggctataaagggtttgagaaagcagttggttttatactttttggtggaatgataaattgttagatacaacttctgtgaaggccaatctataaaaaaaacttaaatgcatgtatcctttgactaagcaattccacttaaggaattttcctacatttgtgtttttcatttgagcaaaatgactgacataagtatagttattgcatcaatacttataatagcagaggactggaaacaacttaattgtcatcaataggagactgaatcagtatattatggtactccatggaatatactgtgcaacttgttaaaagaatgaagaagttctgcagtggtaatggaacaaaatccaagatgcattattaaataaagcaaaatgagaacagtatgtctaacatgctctcctttgtataaaacaaacacacacacacacacacacagacacacacacacaaatgcatagcttatctttgttgtaaggttgtttccaggggggggttttgctgtgtgagaaacaggaaaaagagactttcttttcagtgcaaatccttttatgttttatcattttcaggctttgcctgttccataaaaataaaattaaccatataaatgtcaggaatgatcttttcttttctttttttctttctttctttttttttttttttttttgagacagagctgtctcctccagactggagtgcagtggcatgatcatggcttactccagcctcaacctctcaggctcacatgatcctcccacctcagcctcctgagtagctgggatcataggcgtgtaccaccatatctgactaattttcttcttgatttttagtacagtcagtatcttattatgttgcccaggctggtcttgaattcctgggctcaagcagtcttcccaccttggcctcccaaagtgttgagatcgcaggcatgagctaccatacctggacaggaacttagtcttttaaaaagttagatgatatcagctgggcacggtggctcacacctgtaatcccagcactttgggaggccgagatgggtggatcacttgaggtcaggagatcaagagcagtctggccaacgtggtgaaaccccatctctactaaaaatacaaaaattagctcggcatggtggcgcacacctgtagtcccagctactcgggaggctgaggtgggagaattgcttcaacccgggaggtggaggttgcagtgagccgagattgcgccactgcactccagtctgggcaacagagtgagactccgtctcaaaaaaacaaaaccaaccaaccaaacaaacaaaaaactgttggttgcatttcaaaaatctaactgaaaagactttgtgcacaagcaactgcatggaatttcatttatccatcttggataaaaagcctagttggtcctgctatgatttgactctgtgtttcttcaggctctaagtattccaaaatgatgcattagctccctggactctctgtgcatcagagacctaggatgtgctatttaaatcatctggcaaattgatgtgtgggggaatggaactctttcccccattttttaaaaaaaattaaattttgtaatggtggcacattgtataataagcacatatgaagattggagctatcattttggaaatgaccttaaatagaaggaggaaatgatagactcatagtaccatccaacagtgtgggttcagcctattttccattcctaccacagagctgctgggtgactctgagtaagcagtttcatccaattttactgtaagcctttgcattcctaatagaggcacaatagtattggtacctgtcttattcagagagtggcagattaagaagactttgggtgatttctaacttctagcagccgtacacacgaaaaagtctgtacaatatagtgtgtttttgtactcagatatttcatgtgatggctctattttttgaagccatagaataattcttccttaagtaaaacagcaaactagctccttgatgtcactgagtttgtgaattattttcgttcattttgattagtacataggcctcacaagctattaaggagaaaaaagaagacaggttttcttattcttattttaatgatgagatatatacagttgaaaggaattatgtaaggccgggtgtggtggctcacacctgtaatctcagcactttgggaggccaaggggggcggatcatgaggtcaggagtttgagaccagcctggccaacatggtgaaaccccatctctactaaaaatacaaagattagctgggcatggcgggcacctgtaattccagctacttgggaggctgaggcaggagaatcacttgaacccgggaggtggaggttatagtgagccgagattgtgccattgcactccagcctgggtgacagagcaagactctgactcaaaaaaaaaaaaaaattatatagctttctcaagctctcatgagaaacaggtgacgaagtgaaattttcctgcataatgtcacattggatgagaaatgtatccttatttaaaatgttacatcagggagtcatatgctttatggtgcactcatgccagcagtaacattgttgagctccatatgagacacacagcaaagtggtttaaaaattgcatagggctgtagcattcatttacacaacattcaaaacaaaacaattactgaatcaagcaagtggaaatgcagaatctaagggggtgaaaaaagattgtcttgtgtttacttcttttttaattctctcattgtcttcagttgatattcctctcagatgccagatacctgtcattgttgccagatgactggactctgctggctcatcaaggggctgtggcagtgcttgtttccatgagagctggaagaaaaactgcaatggaaaagcacacgcagtcgttcataagtagctggctgtgtaattctcagtgccctgtgttcatctgaatgtgaacttaatctgatattgcttagaactggggcttcatcaatgcaaatgactgtgcttgcaagctgaacttcaatatttgtgagcagtggcagagcactttggttaatgtgtacatattcaggtttgtagaaaaaaaatctgtgcaatttgactgtggtcagtttagttgccaggagaattggatattcctgggaaaagaaaaaaagtgtctcacttctggagccattgtaaccatgtaggtatttaagaggtttttgttttgttttgttttgttttttcaaagataaatccctttttggatgattagtcagttgatcttaaatatcatgtaattggccatgaaaattgatggaaggctctgttcttagaactgtagctccattgaaactcattctcatggtgtcatttagaaagcaccaacgtcccataggatcacatgaaaacagagtctaaaggagttatcaaaatgatacttaagaagttgaagtaagtcatcccatatctgatcttcatgatgactatcaacacttatgttagatgggcactctcattaatcctggtgttttcccatgatttctctggtgctagatctgatatgaataacttggttgcaataattataatagaagggagattgaattatatacatctttgttttatagctatacctttttttgtgctaataattttttactgtagtaacaacaaaaatcattcttttatcagcttttaaatattcgtattcataatagcacttcccttagtttatgtagccttgtttcctgagcatgtttgctgccttgattctattgttgtgcatgctcttgttctgggggagccatttaggttttgtgtatgccaaaaaaaagtctcatactcagcagttacaaaattactttccttctttatggattactttatattcaagtcctccagtcctaagtcgttgtcagcaaagattggaagcagcagtcagaagtgttctactcctttgaataactgcataaaactatagcccctcaccaaagaaaatgggttttcatgtatgacacgttgatcagcatgagattgctgctgagctggagaagagactgtgcagtgacttacttgacagcagaggtgctttttacttccttagtactcaaactgcagcatctgttccataccagaagtgagcagcttgttttccaatcaaaatggattcttctgcaattgtaccttttttggaaattaggtacactttctaacatatatgttttgaggcccttgagtatttgaaacatttcctagtctactttcccagacttaaaagatatcatgtgtgaaatatgtggaatgagaatctcaaggtgtttgggtggattcgttctacggagaatatatttgcttattgcagtttctcaataaagactttaaagtagctgagggaaaatctaaaagcacctcttcagaactgaaataatttatgtctgctggtatacatagaaccttccagagtataagctaatgagccacctcagataccacctcctttgtgaaaccttctccagcacccttaaaagaaagtagttatcctctgctctgcttttccaaagcactttgaccctctgtaaaagggcttatctcatatatgtgcctcaaattatattttttcatctctctccctatttatcatggaaatcagaaaggagattttgtcttatttatttttgtatttcccaaactactccacccagaccattgaatgtagctatagatcaggcaacaaccccaacccacctggtttcctcctgagtggtctgttcactccctgtgctctgctaggattatatgctcttaaaagcactattcacatactgtttcaacgatttgtttatatagctgtctcttctattagactgcaaattccatggggataggactaagtcctccatctgtattaacccagggcctagcataatgctgcaacacagagtactcattaatttgtattgaatgaatgttggatttattcagtgaatggtggccttgagtatatgaatgggaaatataggggctcatattccagttagcggtactgtatagtgataattcataaataacaattgtacattgtaacacacacaacacacacacacacacacacacacacacacacacacacacacatacacacagtaatgctttttgtccctggaaaaccacaagtaacaatgaagtattctgctttattatgttgatatcatcatgataggaaggatatgttgcttattcactcttactttaaaacccagagatggtattctgtcatttcttagaaggttaagtagaattgatctgttatcagatagaattaaattttagagttttcattgtatctcatgatggaattgcctgttagtttgtgtcccctaggaatgtaagttccctgtgagtaggtgctataccttctatgctgaggttcctagcatagggcttggagagcatggtagatgatcaacaaatatctattgaatggaacataaaaatgaatgtatgatacaattagaaaaacccataaaaattcgttagctttaaagtgaaaattctttttaccgcttgggaagtatcactgggaccaaatggcttttaagagaaatgtagaaaccttctgaacatggcagtatttagaagctggaatatgagtttggttttgattgttccaagttcttcctttggaagatcaaacttcattcctttagaagcttaatcctttttgtgtctctatctttagcttagattctcacccagagaaatagaccttcaataaagttaatgtgaagagaagtcaattagatcgcaagaggagtttctttgcaatcaaattacctggaattttcaggtcaaacctgacagagtgtaggtttcattaaaaaggggcttataggccaggcaccagtggctcactcgtataatcccagcacttaggccaaggtggatggatcacttgaggtcaggagttcgagactagcctggccaacatggtgaaaccccatctctaccagaaaatacaaaaaatagctgggtgtggtgttacacgcctgtagccccagctacacgggaggctgaggtgggagaaccacttgaacccgggaggcagaggttgcagtgagcccaaatcatgctgctgcacttcagcctaggtgacagagtgagaccctgtctcaaaaaaaacgtgagtgggggggcttgtagatactgctctgtatctctgctctcaaatgatatgaacttggtaacagatacacagctcttactaagttagcattcataattttaatttaaactctcaagctagttttggtagctctctattttaaaagagttaacatgtagtttttcattgaaattaatttttctttactctgaaaggtaatttcctagagatgagaaggtatctagcctttttctcttcttaggagacacaaactaagccagttgcagtatcatttactactttgtatcttgctcttttttgtcatcaagggcactggtcttgcttctggaagaattcactgtgaatgagaaagccacagaaggatttagctgtaggagatcctttgcttagaggcttttattttatagatgaggagatcggctctgagatgttaacttatttgtttaaggttacacagcaagtccatagtagagcctaaactagaacctaggtctcttggctgcttgttcaagcctctttctactataccttacgagttttctttgtatactgaggtaggatgctcacttccaggcaaacactgattgctgaaactgagaaactgagaactctatgagtttagagtttggggtgacaacacagctaaaacttaaagacttacacatgtcacattattctttaactagagaataatttagtttaacatcaatttggtagtttaactacaactgctacattgtacctagtgtctggttcagtgtagataccacagggcaacagcagtgaggtgcctgtcacttaaaaggggaaattagattttcccctaaactagaaatcgataagcacagggtcacagtggaaatttacacaattttcttaaatactatgatcttgaaagaataaaagacttgactgcaaaactaaatagcagatattagtcagaaaagatgttggtcatctatagaagcatggacaagatcaaatcgcaaggtaaaggttgcctgtgcctacaagcagagtgtactccagtggttctcaaactttagtatatactttagaattaactggaggccttgttaaagtaccaattcctaggccctatccccagatgcttatggcccaagaatttgcatttctaacaggttcctagatgatagtgatgctggttggggaacaacattttgaggatcattggtctataggtgtgttagttttctactgcggtgtaaccacaaacttaacagcttaaaacaacagccatttattagctcacatttctgtagatagaaatccaggacagtatggctgagttttctattcaggctgaaatgaaatcaaggtattggttggcagtgttcttacctggagctcatagtcctcttccaagatcattccttttattggcagatttcattcctctgcagctttagaactgaagtcttgttttcttggtatcagccagggactgctctcaactcctagaggttgttctctggtccatagagggtgccttcagaggagaaaatacagtagtgtggctgactcaagtgttcctggtctatgtagcaattgattttctctgaggagattaataaatcaacattcttattatatacatcagcctctgtgaatctgcttaatgtgggtctcctcttgctgtgtttaaagattgggttttgaaactgattagctgagatttagatcctggaatgaagataaattcaccaagatgaaaaccaatgttggggaacaaactgggcagccagccctcccttttaggaatcatctctctattgctttacaactgtatttgttcttcaaaattctcattgtatagcatatcttggattaaagccatggttaaaattaaagatctcagaaattcaaacaaaatgtctaataatttttctttagccaatctcctctctttttttgtagaaattgattcttttactgaagccttgagatctctgagcattataaactttctgaactaaagtaagaatcctgaaaataaaatttcaaaggtgaaatggtggcaacttcacttcctatgggaattcctgtaaatatcagagaaaagtgcttggcagtcacagattgttgagagttatcaagtaagcctccataatctactggttcttaatgcctgatctatatggctgactttgtgtgtgtgggtgtgtgtttgtgtgtgtgtgtgtgtcttttatttaccaaattttgttttttcatcccttaggaaaagtcaggctctatttgtttgagtatcagtggctcagaggttcttttatacaaatgtatttagctaattatgtgactcaaatatccaaatttagaattattaaattcctttagagcagattgataaacaggattattgttattttattcccttgtcacattgttagagaataaaactcaatctgtatttctaaagtcagtgacaaccatatcattacattggcaaattttgtagacttaactgaaaccacatcaagcctaaaaggctgcaatgtcacttagaattttaaaagtaaactgtatactatacagctgaaaatatttaattttatagaagttaatataaaatgacttaagattttagttgtctataaaatcaaaatctgcctcagtgtcatgtgcttgtgatgtgggctttggagctgcattaacaaaagtacatgtcaagatcaaagatggacatattcgctgggtgcggtggctcacgcccgtaatccctacactttgggaggccaaggcaggctgatcacctgaggtcaggagttcgagaccagcctgaccaacatggtgaaaccctgcctccactaaaaatacaaaaattagccaggcgtggtgtcatgcgtctataatcccagccacttgggaggctgaggcaggaaaatcgcttgaacccagtgggcggaggttgcagtgagccgagatcatgccacttcactccagcctaggtgacaaagcgaaactctatctcaaaaaaataaaaaaataaaaagatcgacatattcttcctatcgctctctgttctggtcagaccaccttttgtttgactgccatgtgttcacaaagatttttgataaatgttcatttaggagggaaccaatcagattatagattggaaatcaagtcacctgaagtacagttcaacaagctgagattacttagcctaaaaaagagaaaactttggggatatgtttaagatagacttgtttaattatataaactaaccagttaatagcatttcttattggaaggatattaaagagtttacagagtcaaagagaagaaggaagaatcaggctcagaaaggacagggaaagaacagcttaagagggctcagtaaacctggcagtcacattcttctgggcttcactgccaaagttatcacactccagcaactttcagtgtttttgttaagattcaaaactaggggatctggcttgggtcatatgttcactttttggctaaagaatggcagggaatcttgactcataatcccattaggctgcattcagtggggtagaggtaattttcctcaaagatttggggtgctattatcaaaatagtaaggaaatatatgctgtacagacaaaaagtaatgaatatccacaaaggttatgtgatcataatctttgaatattggaaagaggaagatgagccttggtaaggatgtaaggcaatagttggaatatccatggaggcatatatgtttcaacatcaggaagaacattctaacaattagagctcttaacaggctgtattgtgagttatggacttcttattcatagtaggatattcttttcattgcatgtggtggaaacgtgacttgaactagcttggtaaaaagaggaaattagtggaaagatattaggaatgtctcatgtgaacaaagaaaggattgaacagccaaactgtggagagggcaggcatcccactgggccccagaaactgctagaaccagagactcaaatgcagctttccttatttctctttctttcatctctgcttctctcagagtattagctcattttccctctgcagacttactctctcctgcacattatgtgaaacatgattgctaagcatgcctgggttatacatctcccaacaatcaagagaaactctctctagcacatttagtgagaaaaaccttggaaaaattctctggtccaggttgggccaagtgcccaattctgaacaaatcaaccaaggccaaggggcaggacccctagtttggttccagtgccttctctggactgatctcgggatggaaaaaattggctcttaggagaactataattgagaaaagcagttcacagaaaaaagagggatgctttttccagaaaagaatgtggggggcaggcaatatagtaattgcatgtattcaaaggttagctcaatcagaaatattagagaaatgaatcttatgttggtgggaatttgaactggaagaacttgaagttctttccaactcagagatgatgtgattctagctgtttttcaggtaaggcaggcacatattggtttatactaggaattttctttttccacgtatttcaactcaaggattactctgtttggaaactgaggaatatttattcagctgtttttgaatttgaggatagaggaaaatgttttattttctaaaaatgaatgtctggtagaagagaagtcatgtatgctttttaaaaaatggaacctgtggctttaaagtcacattaccttcaaagacagtactcttaaatctgaatgatttttttttctttttgagacgaagtctcactgtgttgcccaggctggagtgcagtggcgtgatcttggtttactgcaacctccacttcccgggttcaagcgattctcctgcctcggcctcctgagtagctgggactacaggcgcacaccaccacgcctggctaatttttgtatttttttagtagagacggagtttcaccatattggccaggctggtctcgaactcctgacctcgtgatcctcccgccttagcctcccaaagtgctgggattacaggcatgagccaccatgcctggccaaatccgaatgatttttttaagattattttggcttgttaagaaaacttttttttttaaataattatatattcatagcaaggtacaaagaaatgtacagcgaggtcatatatatccttcacccagccttccccagtgttgacatattccatggctcaagtacagtatcaaaacctggaaaccaatatgggtacaacccataaaacttatttcaccagtaatgcatgcattcatttttgtgtgtcatcatgcgtagctttgaataaccactagcatccatcaaaatgcctcactgtattatcagaagcctctcgtgccacatcctgctagccacacccaccccatctcatattccctaacctctggtaaccgtgaatctgttctccatctctgtaatcatgttatttcacaaatattacataaatgaaattatacagtatgtagccttttgtaattggctttttccacttttcttatggttcatccaagtggttatgtgtatatagaattcatttatttttattgctgagtagtattttgttgtatggatgtaccatagtttgtttaactattcacccttttaaggatatttggatagttttcagtttgggactattatgaataaagctgctctgaaccttcatgtacaaatttctatgagaaaagttttcatttctctgggatatgtatcaaagagtacaatcctgggttgtatagtaaatctatttttagttttaaaaggaactatcagactgttttccagaatggcgattccattttacatttccaccagcagtgtatgagtgatccaaaatcatttagcgttatcattaatttttaaatgccatttttgataggtgatagtaatattgtgattttaatttacatttttctaatgactaattgatgttaaacatattttcatgtgtttacttgccatctatatatcccgcttgagtgaaaggatgtctgtgtatattttttgctaattttctaattgggttatttgatttttttaatgttgaattttgggaatcctcttcgcattctagatacaagttctttgtctgatatatggtttacaaatattttctcccattctgtaaactaccttttcatcctgttaacagggtttttgcagagcaaaggttttacattttgatgaagatgattttatgttatttttatgattaatattttaaggaatgaagtatacattttgcatactttttattgatcttaagaattttaaattgccaaattacctgctctaccttctttttcagctcagacgtgttaccaatgcagatgcagttaaattttaagatgagtaaaaccattgagtacatagtgtttaagtgtagtggaatgtctgtgtgttctactctattctaatacctgcttttctctagtgttttaattaatgtagcaaaggaagatctcactttctgaggtagtttcattttgagtttcagcaagatttaataacaccggaaagaggacatgtgattctacttgtacaatggattattgtaaataaacacctcatattactaatatttttctttctacacaatcccaaccatattagacagtgcagcaacgtcccatgttgctttgtttatataaatttagcctttagcttttccttttggcagcccatttgttcattccagaaatactgcacacctaccagctttgtcaagattgtgctgggttcagggttataatggggaatagtatacacatagacataggttctgccctcatggagcttacaatttggttctcatttcttattatggtaagcttgtattgcctgtcagtatttcactgatttgattgaatatccttacttcccatcttctgtcacagaatcttcctcattcatccaaaacgcaacatgtccaaatcttagtgaatgctttcagtgctttgggagtggttacattccattaagattaaatccaagccaagcaagtaatacttacaagcatgcacaggagaatatgagatgaggagagaaatcctcatacttagttaatttcttgccaagtagagaaattttcagtagagccttaagttacctcagggatggctgaagattctaaatatgagattccaaagtccaccgttcaccatattctataaaaagagactcagccatttgaacaagctagctaatcagatgccctctgcatagttcatatttttaaaaatcttggtccttatattatttataaaaaaagtgactctatattagttttaaggtataaatgatacacttttcctatctgtaaactagctgatctatttgtagtctggcttaaaatgtgacttgcccaaacataggaaaatcttccaaaacaggatctagactgtgtaattaaaaatcaaaattagttaagaatcaaacgtctgaattgaaaatttaatttttagttaaattatttgctatccagtcatctttaatattttgttttgctgtgagcagggtcacatatgacaaattaaaggtggatcaggccgggcacagtggctcacacctgtaatcccagcactttgggaggccgaggagggtagatcacttaaggtcaggagttcgagagcagcctagccaacatggtaaaactctgcctctactaaaaatacaaaaattggcctggcgtgatggcacacgcttataatcccagctagtcgggaggctgaggcaggagaatcacatgaacccgggaggcggaggttgcagtgagccgagaccacgccactgcactcctgatagaaggaaaactggacctaaggatttgagttttgacattactagtacaagctgtgtgtaactttggggaaggctgctacattagtttcagtttcctattgctatggtaagaaattactacagatttaagttacataaaacaacccaaatttattattttatagttcttgagaattttaaaatcaaagtgttctttaatgactacaaaagctaatacactgttaacctctttccaattctattaataccatcattatctttaatagttgcatggaatccacatggaatgcaccataaatgaatcgaaatcttatgttgaacatttgtttactgtcttttgccattataaacaatattatgatgaacatccctaaatatatgcctttgaatacttgttcaattttattcattggggcaaaaaggtatgcacattttaaagaactacagtccacaggtgttcatgcaattgctgagggttttctgagaaggtgaacaagagcagtctatttcaaaactactgaagccctttttgcatgactgactggcattccctaactgggccttcttcgttgccctgacactgcctgttgctgctcctctgagaaggaatgtgtattcacagatgaggcgctccattagtcatggtgcatttcctgggccctggagacatgggcatgacatcaccaagggccaatgagaaaggattctctgtagcaagctctcaaaactctttagaggattgtagactgtgtgttctgttcctagccctcagggtgtgatttgagcttgccttgctcatccagccatagtctgggcacaaaagtctagcttacagacccaagaagccaggacaagcttgaaaatctgcagagctgcaggcagattcccatttagtatttttttttccagggctcaggttgttattcccagagttttccactcctaatgatgttgttacttcatgtggtaatgggtgggtggtgaaagatgaagtctgcattaaataaaagacatttggcagttaaaatttctgggtaagtataggttggtagcataacaaaatcagaagtacattttaccgttttgttacattgcttttgtgtgtagtttcacataataaaacaacatcttttaacagcaaaggctcctagcaaaatgagtgtggcttaaaatagggcaattaccaaagaactttactgaggggattagtaactcattaaatcttttctcttcaaggagaaaagaaacttaaaaaaaaattctcttttcttgggttttaagcattttggataaaaacttttctgtctttctctgtatctgtctctctctctgctccctaatttatgtatttatttatgaaaatgatttgtggaatttagtcagggataactttgttaattctgcacaccaggaagtctattgaaagacttatttcctaattggcccaatcttttgctaacaaggtataattgtaaaattatctttttaaaaaatagtcaaggaaattaaggctcaaaactcaatgtgagcttacactgaacagacttttatagcttaactcagtagttgaacctaagagctgtgcttttctatcttcattcaatctatgattgaatgagaatggttcttttagtattttttcatgtttaattcctttttgatgaagtcaaagagaaattgggaaaagtagccatctttattagtgtgttatctgtggatgccatatactatggaagaacctgcctctaccacttttaaaaaaatgtttctgcaagataaagatgatttttttttgtaattatagcagcttttatttttaaaaatcacttgaaaccgcatgaatttatccttatttcctaacatatataccagtaattaaaggactttcctctagaactataacatactataagacagggcacttttcaacacttcagagatcctccttcaaagatctctgtgcaattcaaaacatttattactaaaatttcaaaacatctctggagatattctaaatggttttttttttttggcttgtatagatgagaaagttgaggtacagaaagattgaaccttgtactttgtgtcagtcatagaagcagatactgcatacataaatcattcttttatcaaaactcttaagaggacagttctttgtgtctttgtataaaattgttcttgttttcctttgacagcttcaggctttgccttattaacagcagtgcttatttttcaaaaccctttgattgagacaagaaaaaaagcaggttcatctagcctaggcagaactggaagaagccctgaaagggataaattacctaaggggtggcagtgtggggcatgggagcactcccactgcctcactcttagcagagtacttgattcttctcaatcccatcccacaatttctcccacctgaaccaatatttgccagttttctactcgagggttgccatgactcctgatgagttaatattggtaaaacactttaagcctttggaaaaaggtctcataaaagtgtacaattggcactggccctgatagtagtcacaggctttttgagtgggcactaggcaccctcagataaggttaaccagatccctgtttttggcgaggacaggctctagaatgaggtctgctgctgccatcttgagagaacacatctggtttgaaacgttgaaagccaggtgacccttgaagcagccacacagtaatgtctcctcactgcttctgcttcctgctaatttggggagcagcaggtgcctccctgagaaaccctgccagagggttggcatgccatgctgatcgtctcattaagccctaaactttttctacagaagaaaactctcaaaaggcgattccagaatatgacagagagaggtcatgacagataatcagatcagtttataaaaagttaaggatgagtcatgtcactcctaaaggagttggcatcaatttattacacaagaccaaacactgaaggaagaaaagcctttagtctcattaaggagcccagacaaaaatcccacttaatccatcttgcttttccttttcctccaactcagctggtgtgcaggtgtagggcagcttggcagaagatttgaacgtttggaaaagggagtcattactgaaagtcactgacacacacttcccttggaatgctgctgatgtcatggaaaaccaggaccttagcaataacccctaacaaccacagctacagtaaacagtaaatgttacctccaccaaggcattggtttttaaagagttttaacaggccagggcttgccagccacaactcataaaaatgttcttataattttaccctactctctaaaagtgctggataactgctgaggtttctctgccacttgggatgcaaagccaaattcacgtcactttcaaggttcactaatcagaatttacagcatttcttttgcagtcctcttcataccccctgccatgctcacagagttaggtctggtagatttcatactttttcaaagaagtctcttgtcttactgagttgtctcaatttctggtgatggtgtgaattaatgtgccaggttttgactagtgttttattagtctagaggttaggcaaatctggttaattgatagcactcaatctataggttatattccaatcaatttgaaacaaccgggcaaagtggcattctatagttcaaactctgaactgggtattgtcaaggtgaccatataatttatcatcaaaactaggatatttttgaaagtaaaggggctctattaataattactctgagataacagcaataaaccgggactgtcgaagcaagttgagcatagggtcacccttgttactgtgccaagagtcaccatctagctgtcatttattaagtcagacattgaagaaacttgcaggaatgcagaacagtgccactcttctcatgaacattttttgttttagaaaatctagtcattctcataaaaatgttatttatgataagatgttatgagtttattagtgttagttttaaatgaattaaataaatgctttaaaattcatctattttaatttctaatatggtaaatataatcctcccaagtaaaagctctataggtcttcaataatttttatattcttaaagggaacccaagactaaaagttttgagaattgctgctttttctctgcatgggaaagaatatactactaaagcaaaatgataaattccctggcaagagagaccagcttaatcatgattgcatctgctacagcactagcaaaatgtcctgcatatagttagtattctgtaatacataaatatgagtagacaaatctcgtgtgacaacgctgaaaagttgctgtgttttctgacgtttgggtattacattaacattattatttggtttaagtctttgttttttgatattcagtatgtttggtactctttgttaatcttatttcgacacaacaatgatgatgtcatttttccttcgaaagttttatgggatagatcaaatttcctatgaaatgagtatgttagataagaaaacataaagcataataaaagtaggactcctttcttttaacctgcctaactcatgtttatcctttatctcaggtgtcatcttcttcatttggccttcctagaccttcccaggctggtctgcagcccctcccatgtgctttcaaagtaccttttatcacaagacttatgactcagggtcattccattcatatgttggtttccccagttaattttgagtgcttttatgtcagaagcatcctttaatttccttattcccagaattaaatgatgcttggtaaagctattaaagactatctgttacactgaaatgaatataaagaaggaaaaactagttaatttaacttttactagttaatgaagtgttttttttttaaatgtcatatgacatgatttctatagtactggaagaaaaaattttttagagtaaaggaaaccacagtttgaggaaagaagatagattgctttgttatgaccttacatgcagattgatttacatctacctacccctccactctcaaactccttttcagagttagactcttttaagccctttaagggttacgtatttctgagtatgtgatttctgtcaatatcagaaattatttccattggcaaaaaaagttatgaaatgatttctataatataggtttacttttgttgcaagtaacttttcattctttatgtttttctttctttcaaatgaaaatattatcttctatatttaaatttgttccttgagttagaaatataatattttaaatccatgcttaatttaatttagaagacatctccaaggcctaaaattgacttgctgttttgtaagtcaacatgacaggataaacagaggccatagtttatttgggaagcagcatgatcgtcatgatttaataatagtgataattatatgtaataagtaaaagtaggaatctaagttttatgaagatggtttttaatgccatgtgttttgcttggttttagtttgggtcttttctctgagtgctgttctgtgcctccacatttgtttctctttttggagaccacacattttggataattacttaccaaacttatatgcaaattattgatgagagtcagaacacatcacagtttttatcaagtctccactaaaaaaggggttgggggcttgcagtgagctgagatggcaccactgcactccagcctgggcgacagagcaagactctgtctcaaggaaaaaaaaaaggcgcggagggcgagggggtggggggggagttattatgctgtctgagatggagtcctaaaggaacactgtgatttctgtggacaggtgactggctggatggggatgagagagctgggtacttgtcccaactttgccactttctaagttttggtgtgtttttagcatgtcaccttacttctcttagctgctattagtgtccccatctgtaaaatcagtctgatcaggctgggttagatgatctccaaggtcttttacaaatcatctaattctatagcttgtgtagtcttctgtcaggatttcttgttcttgaagtccctagttgacagataatggtgtggaaggaaatgatacatggcagagtcctgaatgaccaaaatggactttgtccacacttatgtgctaatctccaaagaagaagaaaatacaaatgggccagcggccaaacatgaaaatggtgacagtgagcaaaacattgaagcagacagctgaaagcttcatttcctggcccggctgccatgagaaatgctgtgcttgccaaacccttcaggctgtcaaggccagaactttggctagctcttattttgagctccccccataccacacacacaaaccacacaggaaaattgtctctctccctttatatttgtgccttttggctacacttctatttatgccaagtccttgcctaatctccttccttccagctgtcactatactctgcctgttgctttctgggggctttgaaaagcagctgcaaccttcagaggaagcgcagggtggttggcattggtggaagggtattgtaagtgtgtgtggactctatcagaaccaaccgtcacttttacctggtttatggacagtccaaacagtgttctcactctctttccttggcaaatgttagaactgatggctttatttttttctccctcccttcatcttcagggattttttttttctcttctacattactcagcctttttgtctgtgaacatcctgtggaagatttcatttatcttaggttctttggccaggctgctcatcatcttttttttccacataaaacatatttacctaatgagagaacttaagatggataaccagagcctctgtactctctcacaagcctagaaatttgacactttctcaattctgacagttcatcccaaaccattggcctcctaaggcccagagagctcttggtcatttgctgtctgtctagccccagctgttggagaactagcttaggtgtactttcacccctggcctgtgttgtttccccacagagcttgtctgcatatgtctcatattggctcttagtgagggcggctgagcaaagaggcacttggttgtcatcattttagaaaatcaaggaagaatctcaggaagcctgattgaagaatcttggctcaatataggggaacaccatgtactatgaaggttttaagttattgcgcttgcacagactgactttgtggccttaatatggaaagcaaaacaagattaaaatctcacacagtcattgtcttttgtagtagagcattgtcttttgttgatgagtagagctttttgagatacaatgagttgttctctgctgctctttctggaaacttcgttaactatcttgccctatacctggcagtgccaacccacatttctgtttatataaaaggaactccatatcctcttcagaagctagtaaacaaaaaaacctcaaagcatatctgtattggggtttgtctatgttttctcatgtctgtattttgtgttttatttaaaataattaaaatgttaattgattttaacttcaaacagatgaatttgtttgctaaaattctttttttgatgggatcttgtttacctttttgtatactatataaagtcttttttattcatattgggaagataacactacaaagccatttttttccatttctgcctgtataatttcctcaatctttgacttgcttggctatattgtttcaaatacccagttaacctttttattactcatttccttattacatgcttttgcattgtctacaattcatagaatcagtatggtaaaacattagagctggaaaagccattaaatattaactatccaaactccctattttatattaatagatgagaaaaagcctgcagaaggaacatgattagaccaaggtcacacacatgccacagccaggctgacaagtcttctgacccattgtctagtggttttccattataacacctgtgctccatgtgtcaggaattttccaaagcactagtgagaactccatcagagactgcatcctactggaaagggcacaggctttggagctggatagatctgggtttgaatatcttgttctgccacctacgggcggggtacattaggcaaggaaccaaagcttttggggacttgttttttcctctgttatatggcaaaagtaacaagaatactttatggttattgtgggtattaaattatataacctacattaaagtacctgttacacatattatgtttaataagttattataaaaatctgctgttcacagaaaaatgtgatatgtgtaaataataacttaaaataggtatttcattattgggtattctgagcctctcttgttcagtagtattttcttgaagtcagtattaatatgtgaattgagtgaattgtctggaaatgaattactgaaagttatttatatcttgattgtgattcatacatttcccttttctttatggctttcctctgtacttagctgcagtgcatctgcatcctatccaagaacttttgtacaagttgaactcacccaaagaagacatttggagagtacttgggtttggcccctgcttttcatctggctaaacactattagataaatctagaatatatagtctatgtagaatattatgtttacatttttagaaactttggatttttagtgtttttctgaaacttactgaactatgtgatgaacagcttcagtgtgaaattatacgtacttggtctgagtataggtagaagttatgttcaatataaaggggcccaggactgttctgttaaaaggaataaggactacattatttaactagtagtgtggggaggtggaatgagttaggaaacaaaagctaagatggatttagcaaaggccagagcaagaaaagaaagtttaggctgggcgtggtggcacatgcctataatcctagcactttgggaggccttggtgggcggaatgcctgagctcaggagtttgagaccagcttgggcaacgtggtgaaaccccatctctactaaaaatacaaaaaattagtggatatgatgacgtgcacctgtagtcccagctactcaggaggctgaggcaggagaattgctcgaaccaagatggcgccactgcactccagcctgggcaacagactgagactctgtttcccccccacggccccctcccccacaaaaaagtttagaatcgtcgcaggaggtgactcaggggaatttcatttaagggcctctcaaattgcttgggtgttgttggcttactggaatgccttgagtttgaattagagggaaggaccttaaggaactagacagaattttgcttctctattagaggaccctggcttaggttttaaacggaagttaagtgcaattagaaagaggcactatgtacctaacacgtagtggatccttcatatgaaaccattaattgtcaggggactttgaggctcatataatttggcccataattatggctacataagtaaaagctgtaaacactcttagggttttttttaaattgttttttcagtaaaggtgaaagtatagcagtgttgggagggggtgttccttgtgcctatttgtacacaatgtcttagattagattaagagccttaggccaatgattgcttaaagataaaaagcaggcatgattctggagggatattggataatcaaatatgaccaggaaatagaaggtcctattttgctgtattttgggttcatccagatgggatcagaccagaggaatttggcaagcattgagactcgccacttagaaccacactgaaatagttgtggtggcaaaagaatttctccgggagtcttattccacttgaggcataacagccagagattcctggcctttgaggggagagtgccaaagttgatgtattttaaaaacatcaactgagatctataaacctacgagaaatagttgaattggatgacactgggactatgtgtttctgtacttttcttacagaagacatactatgaatacatgtgtcctggaatctacttttaaaaattagttctatgctcatatcctcacattgagatttaatgtatttcagtttaataaatgagaacatataaaataatttacctgtaaggacctgtctatgggaacttctatattctgcttgaaattctgacacattaacctggccatttccaaaaactttctggcaagagctcttcatggacctaataattgctttactgtttaatcattccctgagcctttttatactctagtaaactgcatctgtcactagatttcatcaccatctgtattatttatcccttgtaatctgatatctatctctataatgcccaattgtatccccttcaagtgcccacttcattggcttatatacattaggttttcaataaatatttttatataatggtaaatgaagaagttgttctttatattttaaacaactcttatggaaggagattacaacacagctggaaggaattattgtgagagtgaaacatggaaccaaaaaagataaagcaagggaaattaaaaaaaaaaaaagagctttattgagttataactgacatccaataaacagcacatatttagtccaatttgatgttttaacatatttacatacccattagatcatcaccacactcaagataattaacatgtcttttatccttaaatgtttctacatgacctttgcaatccatgtctcttacccttccttaccttaccctcataagcaaaacactgatctgtttttgtcacaatagattatattacattttctagagttccttattaatggatcatacagtataaactcattttggtcttgcttttttactccaatttattttgagattcatccatgttgttgcatgtatcagtacttcattactttttcctgcaaagtagttttccactgtatgtatatactacatttgcttatccattcatctgttgatggatattttgggttctttctagtttatggctattacaaataaatctactatgaacatttgactacaaatttttgaaaagaggtatgctttcttttttattgggcaaatacctaggagtggaatcactagattataggattgctgtatgttcagctttgtaagaaactgccaaactgtctgtaccattttgctttctcaccagcaatgaatgagagttcctgttgcttcacatccttgccagcatttggcgatgtcattgctttggattttagtcattctgatacagatgttccccaacttacaatggtttgacttacacttttttgatttttcaatggtgtgaaagcaatatgcatgcagtagaaactatactttaaattttgaatgttgatcttttcctgggctagtgatatgtgttacgatactctctcgtgatactgtgcagtaacagtaagccccaagtcccagtcagccatgtggtcaaagggtaaacaatcagtactgtgcagtgtactcttcaataaattgtatgagttatttggcactttattataacataggctttgcattagatgattttgtccaactgtaggctaatggaagtgttctgagcatgtttaagataggctaagccaagtaagatatgatgttctgtaggttaggtatattacatttatttttgacttatgagttttcaatttacaaagaacttattgagtcataaccccactgtaagttgaggaggatctgcaggtgtgtagtggtatctgtgttacttctttgaagaagtgtctgttcagatcttttactcatttttaaaatcagattgtttgttttcttattgctgttttaagagtcctgtggatgcaagtcctttatcagataggtgttttgtaaaaattttctcccaatatttggtttgtctattcattatcttaacagtgtctttgtcagagcagaagcttttaattttaatgaagcctaacatcaatttttttttcatggattgtgctttaagtgttatattcaaactcattgccaagcccaagatcacctagatttttttctatgttatcgtctggaatttttatagtttgcattgtatatttacttctatgatccactttgagttaatctttctgaaaggtgtaaggtcagtgtttagactgatgtgaatgactatttggtccagcatcgtttgttgaaaagactatccttctgcattgaattgactttgcttctttgtcaaggttcatttaactatatttatgtgagtctgtttctgggctctattttgttctatttatctagttatctatattttcaccaatatcacattgtcttgattactgtagctttgtgaatgtatgcatgtattcatttaagagatgaggtcccactatgtggctcaggatggagtgcagtggctattcatgggcttgatcccacttctgatcagcatgggagttttggagtgctccagttccaatctaggccagtttattcctctttaggcaacctggttggttccctgctttcagcatattgatgctgaactaaatgtggacatccaattggcatagcacacaacagcccagaactcctgtactcaagcagtctttctgctttagcctcccaatagctggaactacaagtgcatgccaccatgcctgtcagattactgtagctttatagtaagtcttgaagttgaagactttttttttttttgagacagagtttcactcttgttatccatgctggagtgcaatggtgcaatctcagctcactgcaacctccacctcccaggttcaagcaattctcctgcctcagcctcccaagtagttgggattacaggtatgcgccaccacgcccagctaattttgtatttttaacaagagacagggtttcaccatgttggtcaggctagtctcaaactcctgactcaggtgatccacccaccttggcctcacaaagtgttgggattactggcatcagccaccgtgcccagcctgaagacttttatttctccaactttgtttttctttgtcagtattatgttggctattagtttgtttcctttctagataaactttagaatttgtccatatccataaagtaacttgtttggattttgattgagattgcaccaaatttatggattaagttgggaagaactgacttcttaacaatattgagtcttcttatccatgaacatagaatatttctccacttatttagatcttcgatttctttcatgaaagttttataattttcttacataggtcttgtacatattttgtttggtttatacctaagtatttcccttttgttgatgctagtctaaatggtattgtgtttttaatttcaaattccaattgctcattgctagtatataactaagcaattgacttatgtacattaaccttatatcttatttgtttttggatttgtgtttttatgattccatttacctctactattgttctattagctgtaactccttgtgtagttattttagtgatggccataggatttgacagtatatatctttaacttatcacagtctatcttgaagtgatattataccactttacatacagtataagaaccttacgatagtcttaaagtagttgtcatacattttacttacacataaatatactttagttataaatcccacactgagttttattttagtcaattatctgtaaaatatattttgataataagaaaataaatttaataaatatatattacccagtggttaccatttcctgtgatctttcctttgtatagactgatttactgaatgagatttacctgaagaattttctctatcaggtcttgtggtgtaggtctccttgtgatgaattattttagcttttgtttatctgagaggtctttattttacctttgtttttgaaagatatctttgttgggtatagaattctagattgatagatttttttcttttagctttttgtagttattgctttattgtattttgacttttattgtttctgactagaaactgtgcttatccttatctttgttcctctgcatatatatataatttttttaatcttgttgtttttgagattttcttttctcttcgattttgagaaattgattgtgatgtgcctttgtgtccttttctttgctttttatgcttggggttttcttgagctttttttgatatgtttgtttagcattttcatcaaatttggaaaaatcttggccactatgttttcaaatatttttcttctctctctaccttctcatctttggggtctcttactacacatatataaagctaactgaaattgtcccacagctcactaatgtcccacagctccattcatttttcttggttttttgtgtgtgtgtgtgtgtgtttcagtttgcatagtttctattgttatgccttcaagttctctaatcatctcttttgcaatgtttaatctaccattaattctatccagtgtatttgtcacctcagacattgtagtgtttaccactagaaatttgatttgggtatttttagtatttctattgacttttcaaacatggactatagttataaagactttttttttttttttttttttttttgagatggagtttcactcttgttgcccaggctggagtgcaatggcatgatcttggctcaccacaacctccgcctcctgggttcaagtgattctcctgccccagcctcctgagtagctgggattacaggcatgcgccaccatgcctggctaattttttgtatttttactagagacggggtttctccatttggtcaggctggtttcgaactccagacctcaggtgatctgcccaccttggcctcccaaagtgctgggattgcaggcgtgaaccaccatgcccagccataaagactattttaatgttctcgtgttatgtagctttgaaatgattccagacacataatttgctgcatgaatgataaaagttttgctgtggtaagaacacagagtgtaatcttcctccccatggaaatgttatatcacaccttatcagaccacatatatgaactcatatatgtcttcaactactggactctaaaacacatataaacccaagattttgacagatacgttgagaatgtaggctgtggcagggctactctctgttagcctttgagttattcttttgagcctggccagccaacatcagcaccacttgctagtgttgagggacttttcatgttgttgtggatccccattgtgttggtcaaatcatcactccctagaatctcttgtaaaaagatacgcctcagatgttgttttttgtttgtttttgcttttttaacttaacaaattggtaattgttttaacttttttattaggttcaggggtacatgtgcagttttgttatatagggaaattcgtatcacagggttggttgtacagattatttcattacctaggtactaagcttagtacccaatctttttttttttttagctcccccctcctcccactctcttccttcaagtaggctccagtgtctgttgttctcctctttgtgtccatcagttttcatcatttagctcctactgataagtgagaacatgtgatttgattttctttttctgtgttagttcactaaggataatggcctccagctccatccatggtcccacaaaagacatgatttcattcctttttatggctgtgtagtattccatagtgtatatatatcacattttctttttccagtctgccatttatgggcatttaggttgattccatgtccttgctattatgaatagtgctgcaatgaacatacatgtgctatgtctttatggtagaatgatttatattcctttgggtatatacccagtagtagtattgctgggtcaatatctttaagtgttactgtgccactttacgtatagtataagaaccttaacaatagtcttacagtacttgtcatacatttaaatatacattagttataaatcccacactcgattttgttttagtcaattatctgtaaaatatattttgataataagaaataaatataataaataaatttgaattatccagtggttatcctttccagtgatctttcctttgtacacattgatttactgaatggtagtgctatttttagctctttgaggaattttcacactgctttccacaatggttgaactaatttgcattcccaccagcagtgtataagtgtttcctgttctcctcaacctctctagcatctgttagtttttgactttataataatagccattctgacttgtgtgagatattatctcattgtggttttgatttgcatttctctaatgatcagtgatattgagcttttttcatatgctcgttggccatatatatgtctttttttgaaaagtgtctattcatgtcctttttaatggggttgtttttttcttgtaaattcatttacatttcttatatatgccggatattagacatttgtcagatgcatagttttatgcctcaaactttgactagactttgtattcatggcggcctacttccaccctaattgggcaaatagactttaataattagactctaaatgaaatggaaactcacacactatgaggttagtgtatctcatttattgagtgtattccctaagagatttgttctcattattctccacctgtttaagcattgtgggggagaaaagaatctctttgtcaataagccatgtgattcatgagtcgtattttaatcgtcttcttattttaactatacaaagcaccttgtctgctaactctagtatctgtgtcagttctgagttaatttcaattggttgatttttctcctcactgtgagttgtattttcttgcttgttttgcatgcctggttatctttgattagataccagacattgtgaatttcacctttttgggtgcaagatatttgtattcctataaattttaaactttgttttgggatgcagttaagttacttggaaacacatccttttggatcttgctttcaggatttgttttggcagaactatttaatttaaagctaatcattccccaccatcaaggcaagacccgtctgagtattctatccaatgcttcatgcattatgaagttttccattcttattcgtaaaaataggcattattcttggtcctgtatgagtgccaggcactctaccctctactcctctcagagcattctttctctagcctcaggcagtttccttacatgcatgcactaatcagtactctgatgaatatttgagggagactctctaagatctcttctgtgaactttagctgtcttcttttctctgaattttcagctccttctcctcacttcagggagcctgttggattccacctgtgttccctcttcatgcaacacaacctagaaattctcttaaggtaatggcctgaggaaattgtagaactttccttttttttttttttccctcatctcttaccagatgtccagtgtcttgaaaagacattgttctgtttgttttgtttcttgaaaagtattgttggttgttttaggtggtagggtaaatctggtccctgttacttaatctttgtcaaaagcaaaagtgctcagagatcttcctttaagttttcattggtagttctagaaatgaccaatcacaaaacagggaatctctaactgaaagatccatgacatttcattatagagagttaggaaagagaattaatctgagaattaccattatctagtcttcctcccactcatattcttcataaacatttgcataacacaattttttgtaccattgttgaccatatcaatgggtagattactgaattttggggggaaagacatgtacgagctactagaatggtaagttttgttgaacatgttatataaaaggaaattacgcaaggggagctgggttggtatcatagtatagtattatatttcttttttttttttttgaggtggagtctcgctctattgcccaggctggagtgcagtggcgtgatctcagctcactgcaagctccgcctcccgggttcacgccattctcctgcctcagcctcccaagtagctgggactacaggtgcccgccaccatgcccagctaattttttgtattttttagtagagacggggtttcaccatgttggccaggatggtctcgatctcttgatctcatgatccacccgcctcggcctcccaaagtgctgagattacaggcatgagccaccgcgcccggcctatatttctttatagaggtaaaataggtgtgagatttttgtttttacttattttgctttgttatttgggcttcactggggaaccaagtgatttttggcaagagaagaagcacaaaaaatacagaaaagcctcttcttatggttcctataatggcaaccaagtcaataaatggttgcaaaattcaactagattgcgatagggtagttactgctactgctttatccttttataaatagtcagtttgaaaagtagaaaagttcatgggtaaagagcagtagctagaatgcaaatgtgaatccaggatgcaatatacaaaggtttttgcagttttcagcaagtgtgaagaatttctgattgatgaggccctcagagcagaaagagaccctcctctgtctatgtgtaagattagtaacacatagagacgtggtgttcatctgcccagtttatgtggctaattagcatttagagtttcttcaatagaagctagtgaagtaagaactagataatatcttggaagatctttttgtttcttctgtcttgcactttgaagaggggctcagactgttgaattggaatagaacaattaaacagactgtaaaatgaagtcctgacatgctggttgctttgcctgctctgtcagagcagcactggttccagggagagagaatactagttttgtttatttgtttgtttccagacaatttgctatgtcatcactttttttgtgtgtgcatgcgccaagtgtttgaggttgataatgttgacagagtccttgcagaatggaagttcatctccacagggaaaggctttgtatttcaagttttaaaattccaaaatattttgctataacattgttattcctagttttttatgcctttttgtgtggaaggttggtttctcctttatctacttaccagcttttaggggaatccctttttaagtcaagaaagcaccttagaaaatttctctctctctctctctctctctctctctctctctctctctctgcctttatgaaactgacagtagcatatcttgctattcttgggtcttagtttggaattaagctgtgcatgcagtatgcccagaaggctcagtttttaaaaaatttctatgtttattcgtatttaacttcattctaatggggtcatgtacactgtgatatttattcatgaaatatttaggaaaagataaaatgtttgaactataatgaattatgattttattatccttttattaatgataatacacccaatgctattcttgaaagtttgaaaatggaaaccttggtaaattttttttcttttggcagaattttgaacttttttacataaaagtgtaaacctttgtttggtattatgggtcacctggttccatagcatctctttgatttaaagaggatatcatccatttaaaaaggactcacagccaggcatggtgcctcatgcctataatcctagcattttgggaggctgaagtaggcagatgcttgagctcaggagttcgagaccagcctgggcaacatggtgaaacgctgtctctacaaaaaatacaaaaattagccaggtgtggtggcatgcacctgtggtccaagctacctgggagactgaggtgggaagactgcttgagcctgggtggttgagtaagcagtgaaccatgattacaccactgcactccagcctagttgacagagcaagagcctatctcaaaaacaaaataagcaaaagggacttactttggggatttggagaactagaaaatattattattcatattaacttacacccataaaagagtgctattaaaagttcacttaatacaagggcttctttttctttgctttggatttaaacaggttttctataagctaatcaacagagatttgattaacatacttaagcatgttatatgaaagggatggcattgtgaaagatggggatactatatagaagtaataaaataaaaggtatggaattaggtagtgtaagaatttcagaactaaaatagtctgagaagtcatttggaacatggatttcttttgacagaaaacttctgtcctgcagtatatcagccttgtccagcagagctggttagtgcagatagaagaacctaggttgcttaactaccagttcactgtcctttctattatattgtaattctgttttctgtcttatttcagaagcagcaatccagatgagctctacatcctgaataaaaacaataataatggcaataacaaactattatttttttaagaaatatgacttaaacctatttgtttttatttatttggtttgtttgtttatttatatgtagtttgtcagaaaaccataggagtcaggcattgggtagctcgtggccattagtattattttcaaagtcagaaatcattggagaagaatccccttctaatataaatttttaaactattcttttgagtgtttaggaagctgtgatctctgctgtgataatcctagaagacattgctcaagccacagctggctattattgagactatggaaagagaaagagcttttgccctgatttatcccataaaatgaataataggccacattcagggagacctagctcgtggcagactattctcaccacacccttcacacagcctttttttttcttctcccatcccaagccaccatcccaacctgccttgactaaactcaatgaacaggaaccattgtatgaatcggaaggaaaatgtcttaaatatatgaagttataatgagttggtaagtgctgtaaaaatactctgtaacttagttggaagttgcatcatccatgcctgtggcactatggactggacccaaatggtataattcttcagtgtaacactgaagtaatttttgcatctgccaagtaaatggtttagatttcaaacctatgaaatgccaaactgtaattgttcaattctagtgaaccacagatgtgtttaatttccttcctttactttttgctgtcttctttaggtaagctgaaccaactaaagagtggccttatgtgaatctacaaagtgaactttaacgtcagtcagttaatatactttaacacctaaatgttgtataacactgctctatatagcacttttaaatgtataaaatttttgatagaggataagtccatttcatttagggaaaacagttgtttcaaccacatgtattataataggagtaaaagtggcatatcgtaatgaaagaacacgggaagtcagaaaacctggatttatttttgcctctcctgtcgattcttcatttgatccggcctgaataatttccttttcctttaatttctatatctgctgaaggtgaataataatactttcattggccacatagaggtgctgggagaatgaaagataaattctcccaaagcactttgaactgcctagaagaaagacttatttaaacaaaagttgattctgttttctatctttttatttcttacaagcagacaccaaagtaagtgttagaagagcctcaaagatttggttattttttttttgcaacttttattgtaggtgagaaggttaatataattgccttcattgtataaacagggaaactaatgctcccaaaaggtttgttttggggcttaaaatgagtagccctttatgagaataggggaaattgatgggggtgtagatgtaataacatcagccatgagttgacaattattaaagctggtaatgggtgtgtctgtttaggggggttatcatgaatactatcatgtctaccttgtctttgaaattttgtattaaaaagttaaaatttaaaaaattgattaaaaaaatagctcattttcatttgcaaggttcttttaaaaatgctattgaggctggtcacggtggctcacgcctgtaatcccagcactttgggaggctgcggtgggcggatcatgaggtcaggagttcgagacaagcctgaccaacatggtgaaaccccgtctctactaaaaatacaaaaattagccagccacgatggcgtgtgcctgtaatcccagctactcgggaggctgaggcagaagaatcacttgaacctgggaggtggaggttgcagtgagctgagatcgcaccactgtgctccagcctgggtgacagagcaaaactccatctcaaaaaaaaaaaaaaaagacaaagtatatgcttggaccctgaacacagacattttagtttttcatactcagtttttacattctatttccaatgctttctaaccatttactacttttaacatattatgccatttctttagcgttaatatattacacttttttcttactcccgttccagatgtttgtcatgtgctttgttgtcaattttagattttcattttcctatttttgggaattataagcagtcacttattaacccaattactttatgcttcaatgggcttgtcattgggtagccatgtgaattatttcaatttttagagacacagatcaacctgctaccctatacccacaacagaaaactgccgacttccccattgtaggaacttacaatcaaacggcatttgaaacatgtgagaacactcctattattaaaaaaaaaaatcaccctcaacctgggttattttcactgacagacttgcatggttaaagcttgctatttcatgagctcccagatgacgcaaatgctgggaaatgtaacatactcactgtgatttgtttttagacatcaaaagaaatccattttacaaaggaatcatataactttagagctaagaaagatcttaataatcatctggtatagatctttccatttatttatgccagaacctaaaattagaaaggccaggtaatttgctcagtgttacataccttagtatggcagagctggaacttgaacctgagttccctagctttcaattcagagttcttaataggttgccactcaagtgcagtcaggtctttgatgctatttgtgaacaccaaatatgtctctgcttcttacaacttagaaatcttactctgttttgcaatgccctgccaagtcatattggagcctgaggcaaaatgaaagaccaatgacactgatcctgtctttatttaaaattctgatattttcttcactatggatttgtgggattaattttgattttttaaaatattgcattaaatattatatcttgactactgagttttttagtagctcctaaaattttgcatttgaagtgggtgccttgcttgattcaccctagtcccaatcctattatttttgctttaatctactaaatccctttttcagccttctggcaataaaataaaatcaacctatggaacctttataagcaaacccatactattggccacttacaaacaatggtggcaaacaaaccagaatctgcaagtgcttttcattggcttgattgttggtaacattgcatggtaattacatagtcatttttggctccatgaattgaaactctcttggaatgtctagcagtttattgaaaagagctcaaagccaagacgtgagttcttttgtttgatccttcacagtattgtgttttaggctcttatatcgttgtgtttgttttgatttctataaattgggactcaagggaaggaagctctttataggcctattattttcattttacttggtcctctcaacacctgtttgagataggcactttataggctaaaaccaactcacactgacttaagttaaaagagaattcactagctaacacaattgaaaaatctaaggagtagatctgacttcaggtattacacatcattttgtcagggctttctctctcgtgttttctactgggttggctttattattattcaggtttttcctgtgtagtagcaccaggtgtatactctactagcttagcaaccttagtagaaagggaatgaatctttcctgattgcttgagccagagtctcagaattgagtataattggcccagcataggtcacatgcacatccctgcactaggcattaaggcctggcgaatgcaattaaatcactggctgaacctggttcatgtgttcaaccctgggtcagggactggattgagagtagaagagatctgtttcctctaaaggaagagacgactttttaagtcttttccccccaaaagggattctggacagggaaagacaaatgtcaactaaaatgttactattctcacttcatttatgaggaagttgaggattaattaagtgaattttcacaaggctgcatagctaatgagtgataggatcttaactttgacccaaatctgcctaaatctaaagcccatctcttttctccacaccttgtatccctagaacatcatgcttcttcctctttctccttaatgtgaaaccatgatggttgccatcactttacagcagtattcttcaaaaaggagggattttgcccccagaggaaatttggtaatttctggagacatttttttattgtcacaactgtgcacagaggtgagtgtggtgctactgcatagaggctaggatgcctatacctcctgtagtgcacagaacaattcctcacaacaaagaattacccagcctaaaatgtcagtagtggtaaggttaagaaaccctgctttttaggttcaatttctcggctgttactattaacatcagttttgagagaaataagtaatagagagcaggattgaaataattcatacatgtaggtataattaagttgtctcttaattcagggaaacttcctttaatttccatagaagctaactttagaatattgaattatcttggttagtgagtaaattgcaatagaacgtaaattcctttttaaaatatttgttttatgcaagtttaagctaacttcccagacataatttttcattctaaaataagtcctataatttttttcttaaaatagaaatctagggatattttaaattgaatactgaatgcttttaaaggaaatatataagtttatctcaaaagccttttaatatttcatatagaagtttctataccaggggaaataattattttttaaaatccgagctgccgggcgtagtggctcacgccagtaatactagcactttgggaggtggaggcaggcgaatcatgaggtcaggagatcgagaccatcctagctaacacggtgaaaccccgtcttgactaaaaatacaaaaaattagccgggtgtggtggcgggcgcctgtagtcccagctactcgggaggctgaggcaggagaatggtgtgaacccaggaggcagaggttgcagtgagccaagattgtgccactgcactccagcctggatgacagagcgagaatccgtctcaaaaaacaaaacaaaacaaaacaaacaaacaaacaaaactgagccaaagcatttctaaaactttggatgataataagggatttaatgtactaaaaagcatacagaaattttcttcctgtaagcatgtgctttgtgaaagaataatgaaagcagaagaatgcgttaaatgtattatagctgcagttattgggtttgacacttcagagaaatcaaccttcttgttaaatgacatgaaaatagtttatactgtctgactccttgagacttgcaagtcgtttctgaattgtgcatatctgaatgaatccagggaaagctgtgcttctgtagtcaaaccacagataatattctagtagaagagctgaatgagtagagtgatactacagatggatttcatataagaaatcttttacaatccagcaagtcaaatttattgttggagtcggaagatttgaggcttagcattttctcgttttgccagttttatacaaataattcttcttgttttccaaattctcatgactgtatgcagcatggaattacaagtccattcctttctctggttctttttaaccttatcagacccaacccagatcaatgaacattcctctgatttcaactgaataattctgacttgctttgatatctcacatggatgactttcttcccatctctcctatcccccgatggtccttcagctcatgcctgtcgtgcccatttttttggcctcacttctttacctaatctcaggaatactcattgctttttctatttcttctatttttctttggcctctctttccgctcccatattaaatttcctccttggctataacgcctgccttcttctgtttcccaagtcctatttactggctctgtatccttagactcacttgtttcttaattcatatcctcatctactaaggtgcctaatggccacccacctagcatattttagtaaggcatgtgtgtacagacaggtcacctattcattgttaatagaattcaatttgcagtttccctggaaataaggcagtttctgatcttcaaatcacccaagttcttactcgttagaatgcaggttcctttgtcacattaggaaggacagtaatatttatttatgaaaaagttgaaaaaatactgtaataaatggtgctgggttaattaatatattattaatatggtcctatttttcttgagaagaaatgttcttgaagatttgaaatttcttatctgtttacaaacattttcctggtgccatcagcagtttattcctctttactgctttgtgatagggcttggtattcccaattttacagagcagagatgacaggtcacttgactaaacaagtgacttatttagaatttcacaggaaagtaattacagagcccttaaatttcctgtctcttacttctatgatataaaacaatttactttgcattccttatttatataaatgccttagagcatttcctttcctttaataaaatcatgaagactatcacctggtaatgaaattgttaggatggaagagaaatgaactaggcacagtgtacgtgaatttgattattgccttttcaactgtctaataatgggagctgtgggctcataggctctccttttgaattgtgaaaactatacttattttatactacattggtgaagttccctgaagtccttaaaaaacaaacaagatttaaagtgcaaaatgttattgttaagttaaaatgacccttgtgtgtttgcaaagctccgcgggctttctggggctagtgatccccttggtgagcattgtggagtgtggtgggaaccagccatgttttggtgatttcttttagatttctaaaactgtttttctgttgggttgaagtgggaaaacagctttggaactgcttttggtgttgctctgagtgtgtttgggagtgcattccaatagtttgtgaggggatgttagctgttcaggaaaaataacccttaccaaaggtaatggttcccactagcattttcagtaacatgtaccagatgtgggtagttaattattctcagatctgataaatacctgccagccaagcctaattttattttcagtaaacagtggccaaaggtcctagctgttcatttgataggatgggcctgtttgcacttatctattaataaaagcacaacactcctttagttttcctttcccagggccagataaaacattttagacactcacgtatttgtcttagtaaatcagacaaagtaaacaaatctggtagattaacttggtaaatagagtgtggttaagtgttacctttggagttgaactcaatgccatataaatagcattaatcgcatggtattttcaataatctttatggagtaaaacggagggttgtttttttctttcaaccaacagggacttaagtatatttcttaagtactttcagatgtccttctgtatggagattttaaaatcactttaaaatgaaatttattcttttgtcccattagtaacttgttgggaactttgtactagttaacattatgtttaaaaacctggaaacctctatagttcatctcagaagaaaaataggactacatagtggcatgcaagctttgccagacagagataatggccatctagaggttactgatttgggtggaacagtgaaaatggggccgcttttatggggaagacagtggctggtaggcagaaattcactttattcatatgcattttttttcctcttgggtaaagagttttattagggtcagaagtactatttatttttgtgaggtaaattcttgtcttgtgagaactggcatgaaacagactcattatttcacactagccaacaaaacagtattttatcaaagtaacttctagtcagtccaagactggactggatttgtactggtaacctggtggtgcagggctctaagtctcatgccagctcttgtctccctcattaaacttccttttttagtaatgattaaaaacaactctctttactacaatatattttctcattggctttatactcgaagttgcaagtactttataaaattatttttagttttgcatgctgtataataatccatctaatttggtaagcatagtacataaaagaaatagctgaaaggctttagagaaagttccctactcatacctccccctttacaatgatctcggcattaatatcttatgctgtaagagggtggcctggcacagtaccatgaatattgtgcccgatacccagtggtaacctaccaatgattgttatgaaaatgatggtgatgatagtataggggagagagtgtaaaccaaaagttgagatctgtgttctgttttcagcttcattttaatggcctactggaagaccaggtacattatttctgctctttttttttttttttttttagtttctccagctatacatgaagaaaaaagtcctagtccactagccaacctgacaggcatgttgtgaaaactaatgaaagtataaagttctcatagtccgaagcataaaaggtgctgtaaccaataggtacaaaatactaattattatttttacagttcagcatagtaaatctttggagtaaatttttttcattatatttactagtctttcctttaagaattatttgccaaatttaactctttttctcttttaattagacccagagtatagtaaaaaaattgatggtttggctttcagaaagagttattttgttatctgtaccaaattttcaattaaatatttttagctgtgaatcaagtttcatcttcaaaagtgtcttcaattttaaataatttgagaatacttacctggttagtaggctaaactaacgtagtagggaagagagtgtaagaaaagtgctgttgaattcatcattcccattagcaccagtctgcggattcccaaacatatatttctaggctcagatatttttcctgatccccagacttattaatccaggaactagtcaacttctttacctggatgccctgtaatgatttgtagcacaacatacataaaacttaatattctgttcctgaatttgctctctctgtgaatggaatatctatccaccccatctctcaagctgaaaaaccctcaccccatttcctcaacatctgtagatttaactgtcttaatactttatgccccttatctccatcccacaattactaccttaattcggcttttgctcttctgtcaccgggcagctgcaattgtcttcctgccaccagtctggtctcattacagtctactctcgataccatttccagattaacctttacaaaatgcaaatcatagaatattactgtctcattttaaaaatatttagtggtttcttgtgtgctataagacaaagtttacactctttatattggttattgaaatcttaataatctttaccttgtttctagtcttgaatcctcttatgacctctgttctagtcacactgaaagtttgtgggttccaaaacatgccatgttgttggacattctacattctctccacccacttctttaattgccaacactgttttatattttaaaacctaattccagtgtgaagtcttttgtaactccctccttgtatcccatcataccctgtatatacttcttacatagttcctataaaacctatagcacgtattttgtgtatatccttcccttcctgctttattgtatgagagattatgtcttgtttatttttgcctttcaacgtccagctcagtggttggtacagaggtagcacttggtagattgattagatagtgggtggagtaaaattctatgaccatattttcctcctcaagttctactcccttttcagtgttgcatggaaatggctttttaaagtactcagattaagatttgatgggtagacgaggtctttacttaattggtatgattgatgggacaacaggaatactcctgtaaccactatacctacccaaagatttcatagacagtctgacatttccccatgaaaagtcatttattagagttctgatattctacttattatactccctgccctctttagcactttataggtacaaagtcctcccataaacattatcttatttaatttttaaaacaagcttatgagatggattttattgtatatactttaactttatctctaaagcatatacaatataatttgcacccttaggcagatctgtgaattgctttgaagaataactcgctattctttttcgtgatttggactactctgatagtgacactgttttgctaagctgtgagagtttggaagtgtctcccataattttgacactagattttattgggtacagcacaaatatcactccttggggtgggccacatagtcacggacccacagatactcagataggaagaggctctaaaggacattttctctttatatatggaattgtatgaaatttaatagaaatggatctctagaattttactccttttaatcaggacagtagtacaaagcaaaacttttgtacactgcctagcatggtgctcagttctgcaaacgtcttttatgtctttgatagtgatggtggtgatgatttagaagcagtttttgcccatatacatataccatggtaaagcagttttctcgtttaccaacgatctatgaggagcattatttttatagatcttagatataaattctctccttcagactgtttgcctgaaccttaaaatgtagcatgattacacaagcactctggaatttagattaaacagcattcaatttgaaaatctaatcatatcatctaaatatcattaagtaataataggctgattgatagggaccaaagctgttttggcctggtgttgcatgcctttcactcagccagccttttcaaaccaagatgttgataaagaggtctataaatcttaatagttggagacagtttaaaagcatagttcactggataaggtcacacccacttaagtgacctattttgtatacttttcaaaaataggttaattaacttaatagaaataagactctcatattgatgtgcaattactactaaaacagctttgtttttttttctttccaagtgaacatgatgttcatgaaattgagggcataatagccatgacaagaaccaggcttagcaaggcaggtcatgttcagcgagtacatttcagacttcccctttaaaatcctcttttattccaggtcctaggacataagcatacacctccatcagagcagtttattcctggctctctcctatttcagtttttaggagggattattctagctgttgttgttttcctaatcactataacagcactttatatagtttctgatccctgaagactccagcttgcatagtaagctcaatgaattttggtctctttttcttttaatctgaggctttcttcatttttctaacagatggatgattcatttgctaccctgggagaagcatggtttcagaggaggatacagtataaaagggcaagggagtacccagaccagagtcatattctggttatattctcctcatacagcctgctttcatttgttgttgtcgtttagtgcccatttcaaattttctgctcctaaagccttttatctactcttagtcttcttattgatgattataaccttcttagtctattattggtcactaattttgcataatttgattttcccattcatctgttccttaacatataaccccttaatgttttatatcgtaagttgagtacatgggcatttattattctttgaacttttaaatatattttaaataacatatacatttagaaaagttaacctcctcccccagtctgatatcttgtatcacacataactctctgtgtagatgttgctgagtcctgctggctcgaattttcctgtggccagatggtctgagaggcagttagtgatgcacattcatggaagggtgggttcttgcaaggtagccatgatgggtatatttgaattgatggatatatgttgatctgatgggcgtattttgaattagaggttctaatatatatagcagaggttctagatgacctctttgttcaccttacagtagtgtcatttctctgcttgtttgcactgcacttacaacaaagacttttctaaattaaacaagtcttgtttatatgttttgtgtatgtgatcacaaaaaatagcaaagaatactgttctatggactcttagctgtggtggaaagaaccatttaaactctctcagcctttagttcttcattaggaagatgcctttcttactgagggttgtaatgattgtgaagtccagttttctgacttctccattagggaataagagaactctttggttttaaattgaaagatggagtgattcactctccagtgtaggagggaacctactctacttgaatttgctatatttctttatttcctaggaaaatgttggtggttttccctcccaagcattctctctagagtttagcagcatcctttccttgaaagcaaaggcctcatttcctatttctttcatatcctttaatttgcctagtacagggtccatttcatagtaagcactcattaaaaacattttagttaattaactacaaaatgtctggctcaggtttaggagagaatgaaagattgggcaggggaagtactggcacacaggagaattaaaatcagaggatatcctttttattactaattctttttccaataataaaagtactctattttccttatttaagaaagctatcatttaaaaaattagtgttctaaaaccacaccctgaaatgactactgttaacattttgtcatatttcttactagtcttattttatacacatttaaaatttttacatagtttagcttatattttatggtttttatatagtattttttacttattttatcatctcatcctattaaaaacttttttgtcaaaggaattttaatggcagcagaattgtttatttcacaactgtaacatgaattctataaccattctagatgttggacatttaggctgaatctattttttcatgattataattagcaagttgccttttggaaaggctatacaactttttattctcatttctgaacataaaatgttgatgaaaaaaatgtattgggaatgataacttcactgagttttagaccagggtttccagaagtaaaatgttcatgtcttggttttggcctttgggtagaaaaaagtaagtttttaccaggagtccctgaaagggaaagccctgctggccaggggtttcaggctcctcctccataacccatcaagtggccaaagtcttgattttctgtgtaaacgggtagacaggttctcagcctgatcgagtcatgtatttatagaagaggttctctttttcttgaagaatttctgacttacttgatctgtcatcattgtctcttatttgtaactttagagcctgacagaacaaaaaagaaataagccatttctgtagcagaatcttatttggagaaaaggattcaagactacagcgtcctatttttttttgtttgtttgtttttgttttgagatggagtttcactcctgttgcccagtctggagtgcaatggcagcaatctcagctcactgcaacctctgcctcccgggttcaagtgattctcctgcctcagcctcccaagtagctgggattacaggcgcccaccaccacacccagctaattttttgtatttttagtagagacagtgtttcaccatgttggcccggctcgtctcaaactcctgacctcaggtgatccacccacctcggcctcccaaagtgctgggattacaggcataagaaccgcacccagcctacagtgtcttttactaggaattgtaattttattagtttctaaagaaaatattaaatgcagtgttttgtaggcagtgattacctttcatcttgtttgtcatatttctcattctttttttgtgtgtgtgacggagtctcgctctgtcgcccaggctggagtgcaatggggcgatctcggttcactttaacctctgcctccggggttcaagagattctcctgcctcagcctcccaagtaactgggattgcagatgcccaccaccaagccctgctaatttttgtatttttagtagatacaaggtttcaccatgttggccagcctggtttcgaactcctgacctcaagtgatccacccacctcagcctcccaaagtgctgggattacaggtgtgagccaccacacccagccatatttctcattcttattttaggctgatgaaaatactaaatatttcaacacctctgtatcatagccatgtttaaatgtgcatatccaccagtcaattttaatacattcctttctagtaaattctgttaggtcttcagttcaactgtacctccctcagtgtcactttttaccttccctcctcccttaaatcgcctagttctcattttgaaaaggtagagaaatcctttgtcagtagttaggaggatgtagatcctgtatgattttctgtcattacattcttaatctattacatgtgtatttgtcccgtccttactgacttaacctctgaccacattgcaaaatgtaaacagagccagataccgacaggtttgtcccttcattagccagggcccaattcataatttctattttctaatttggagaataagaaggttagctagattaagaggctttcctaagtcacataaccgtttgcaagtagctaagaacaggattgtgaactcttgccaaactcctccataaaattccataagcttgtgggagctcatttatacaatatttaagaggttatataggcaaggagaataattgaatttctatatatttagattgactgatatttcccaaacttcaagtggaaaaaaaaagcccttaaagaaagagcttaagagaattaaaatgatgtgacccgaaccatggttcctttctcattcaattattttcttttaaccactgatggctttttgtgcttggctgggtaactttctagctagtcaagcctatgttatgaaagagaaataagacacttaatcctgtgaatgattaactagtattggcctcccttcccagtagtttgcccttcctgtattgtagtctgtgtactcatttctgagccaaatctccaaggtctcttattattgagtgtagggacacctggattacagggagttaggcctttgttttagtctgaagatgatgtggctaattatacagctccaggcatttgcattttttcaaggcattttaaagtttattgcttgtgaaaacctagtttgtaaagtatcatttttaaattttacaggtgaagaagtagaactcagagaagttttacttgccaaaagttctgcagcaagtcagtggcaaattcaaataagtgtacactcatgtatacttagctcagtgtttaactcatggaggtattgttttgtttcttatttataatataaagccaagtagggctggctagagccatttgtagttaatacattttggtctttgatctttttccacataaggtcagacttcaagatagaaaaatattctttatattctttgcaaagagctgattgccatctttctatactgcctgtgggaacactctggccttagaatccaagattttattatccaagacagcagccagtaagtacagtgagacctaagtggggaattaacttttgggctgtagattttgaatgagaagtcctactcaggatctgagaggtgacaagaacgagtgactattcattgatttggattcctgggtcttggcaccttctgtgggataagaatcacatgcaatatgagtaattttgtggaaaggtcttggtcctggttcatagactgtctcagttcctcagtagagagaacttagaggagaaatgactcccttgttgtcatattgaagcagcagcagactattagggagtacccatgttcctggcttctttccttgggctggaaccattcaactgcacagataaatgtttactcaaggaagaatgcatagctttgaaacagtcttaagatgagtaaaagtcttaagatcagtaaaatatacaaactactcctatgtaggtcattatattaacatctgtggccacatattggtccatgaaagggatacttctagccactgaaatcttaaccactagaaacttactctgcagggcatctttgtaattatggcactgagtagcccaagtcttagattatttcattgtgatgtttccagtgtaccatcaactgtataggtgattagcatttgcctattaattccttcttcctctcttatcttcttaatgactcttatacattttgttatcttttcttactctccatgtagtagttcttactctgcatgttcagactctagtggaggtgctaggaagttccactttctggtagattatttagagtacaggatagtcaagggaataaggatggtgctaaggcaggctgtggtggtttaagcctatagtgccagctactcaggtgggaggatccctggagcccaggagttccagggtgtagtggagctatgattgtatcactgcactctagcttgggcaaaaaaagtgagaccctgtctccaaaaaaaaaaagaaaaaaaaagtggttataagaaccataggaaagagaacaacatcattttgactaagacaaaggcataaccttgacagatctcagtgtctccaggctaagagaagagcaacttagatatagtaccttgagcctttcaatgattgctgtttaaaaagtatatgactgtaggataggatacattggaaatactgaacaatgctggaggaaagccaacagcatgtggataagaccatccaatggggccaagatgagggggcactggattggatcaacgttaatgactaaaattctctgcttctaatatacacatgactaactcccttactcacttcaagcctttgctgaaatgttatcttctcaacgggtctgcaaacctattctgacctacctatttaaacttggaattaattgaatgaattaatggaagcctcatgttgattaatcctcttttcaaggactgaactgcattacataagaaaatttaattctattaatggtgagctcagtggcacaatccacatctaagtttttagctttatcctccttgcaaataatgatattaagttagtgtaaatattaataatatttgcccatgagaaaggaacagaatgttctctacctttctccagccatactttgaatcctggggaatcagcatttcccagaaagatcaaactatcgatgacataaagcaacagattgattccattgatgatctttttataatactgacgtaccacattcttccccatggcttttgcatttctatctttccatctgagacttacaacttcaaactccattttccatgcttttgctggcatgaagaaggaaaaaagaaatcatggtgcatttactggccttaaagaaagttggtatgtttataaaagaaataaagcatactgaagaggaacagtatttgagtttcatcagttaagcagagcaatttaagtactgaatgcttcatactgaccatttccattttattcattgtaggcaggtttataaagatggctaggtgcacttgtccatggttctcccacccgtgtttgggatgtgctacctcacaagcatagctggctggggatagtctttaggtggaaaatagctacgaaatacctatttttggttgtattaaatgagctatggctgacatattctgtgattcatttctttctaaatgagtgctggggcatgatactaagtgtgcccatgtctcactggtcttgggttcttttatggttccccagccaaattcaagttgaattatggtgtccgtttaacttacaggtgtctgagataagttgtcagttaacatttatacatgagatcaccatctcctagtaagtacagagtactggtagaaaatgtgtggctcagtctgacttgggttcaaatcactctaccgccttttattacatgaattccatcaagtgaacctctctcagcctccatttcctcatcagtaaagtctgacagttccaagccaatggcttaatgatttctctactatatatgcacttcctagaatagttgcattcaaatttgcaatatctttcatcaagatgttgcctctctttccttctttttctcttccatcacagtaagtgatagaaacctgcttgctgcactcataaataaatggccagacgtgtgctataataggcaggatcctcctgctgagcctggactccatttggatgctgtgttcgttagttggagtctcagagtatgtgccaactcaccaatctagctaatccttaaatatccctaggagatgatgaggaggcagattttatctcttaggcatgcatcttggaaaacataccaagtaacacgtatctatttttctggggctttgtatggatgggtggcaagtgaggcacagagaggttaagaaacttatccaagattcacaatagtaaatagtagaactgggattcaaacccaggtccaactaattccaaaacctgtactcttaatcagtatgctgttctcaaagacttagctcttaaatccttagtcatttctcaaaataagataatacattctagtgctgaaatagtggatcagaaaatttagagtttactctcagctttaccagcgacttcacctcaggcaactcaatcatcattagatgatttctctatgaggaaatgaggatcatgatgtctgtcactcagggatagaatgagcattaaaaactaaaacaatagcctctgtaaaagccctttggtctccagagttgatgaacattgcattaatctacagcattaatattttatattgaagacttctgagcaggtcattttgaacacaaaaaaaggtaaactttggatcatgtattccctggttctagaaattaaaggtaaccaaccttgaaataaatagttatagcagtgccaaaagaggatacgattatggaacaatatcacccaggtatcttacacagaaggcttctggattgtttcagttagcagcaagagtatgtatttcatgggcctggggcatattaatcaactgcactatgccaagatggagttctgttttttactagagatctgctctaaatcactctgttcataatattgtcatcaaatttgccatccacaattgaggcatgtcacaaaatgagcaaaggagtccttttctctagagtgtaactgccagaatgggccaagaaaggtaatattggactaagacttgtttctgagaaaagtttttcttccagattcaagactgacactgagtgtacaatgccacattgacttccaatggcaaacagcacataattctgtacacaaacacttagtgatgttttcctctaaaacttttaaaagcaccatctttttctgggtgccagaaaggcactcagcccaacagtataagcctatgactgctcaagcacatgtgtgtgcatgcacttgggtgtgcatgcgtgtgtgtatgtttacacaggtaggcacctaggtgttttgttctccatttttagaatgatctttgttgctggccagtaccagagtgatctaattatacatgctttactgatttccatctaccaaaattcatgtttcaagtttaactagatatccttagtggatgtttccttaaaaacatgcgatcacatgtgcttatcttttctctcactaggctggagcttaagtccacttatgaggagaaaatatataaaagcaactctaaattggtgagggcgatggagggggccagtggggaatgagagaaagggaaaaatgaaaataagaagcaattaagttttttttttttaaattagcctaagctcctggaaacagatataaataaatttgagaaagccttccaaaagtcagaagaatttaactctccagccgagatgttcaagctttctggcatttgactaacgttttatgctctcttgtctattgatcattgagccactgttgagatgaccagatgaccaggtgctaagcatactttaaagaaagttaccttgcctgaagacattttcctactcagatatctttaacagctcaatgcacatgaccttggcattgcttcaaaggtggcagctcatccaagtaggcagaatacctggtctctcagcactgcttttataatgccctttttctaacgttgagctggtgaccatgctgccctcttcattttgcagtaatcagggttgtcttcttttttcatatccctttcctgcctgaggctgcttcaacaaacagcaagtataaactgaaaccctatctctttgcggatcaaacacacagcttgaatacattgataaataactttaaaaaaaaattgtttagcctgtggacctatttatcagaatgctatataaaattattgttttccagtgacccaattagttgaaatattctttctgaagctataggaaaaagacttaatattgtttgatatgattttatcatttgtttagttatgtatcacttcccactttacagtgtgttatgcatactttctttttttctgtcatccttcccccatgtctctactcttcagtctcatgcataaagaaacagggttccctacttgacagtaaccacatgaggagttgacattggcaactggtttaagacttcgatcataagtcatctaagtaattgggctatgcgtatcctgttgaatcacattccttctcaaatccttctttgttaaaagtttgaagcccaggcctttcaattttctcttatccctttaagtccacaaaggaatttttaggctgtttctggagggttataacttctccccagtgctgtccaatagctggcatattggaaattggcagaatgtgggtgcaagagagaagggagttctcagtaaagcaccattagaattctcccacagtttgacacattcatttcattgcccctgttttgtgtggctagcaactgatgttgtttggctgtgacatgcgtaaacagatgttgtaaaaaacctgaaaaacaaaaaatcatctttccctactttttcaggcatactgaagacagaatccttttttggttatcttgaagagtctgaaataggaaacactttgaagtgtagataaaatttctgctctggtcacaatggatgccaagtgttataaaatgattgtgggagtgtgtttctatattggcattttgatatagaggcaggtaagagcaatgccaccttcctgcagagtactctaaaaccctttcttccttcattaatagttttcctttgaagataaaggaactgctttcattatgtgtgaagcattccttttacagttaaattactgtttattggtgagtggtttccttgctgcgctagtatgcggcagatgtttctcatgtatccctaggttttcaggctttttcttttcaggatgaggctctgttgtcttttctttttttctttcttggcaagaatctgattgggataaaacacattttatgcagcaaattaaaaatacgtatttaaatttaccttttattttttacctaaaaagttcgcaaactacttgtagctattattactctgaggtcattcctctgatacaaatgtatttgttgttttatttcggagctacagatagaaaatctaaatacagaatattaaaagtatgtagtgtaacatgacttgtacttagtaggtactccgtaaatgtttggaacttatgaattgaaggtttctttctgatcttagtctagaacagtgcttcacagcctttcttatgtcataatacacatagaaattgataatatttatatgtcatatggaatttttttcaaagaacatctctagtaataacataatacagagagggatacaagttgaaaaatgctcttctatgttgttattgtaacttttaggagtaagactaccatagaaagcatgcattagaatgctaggctatgacatgggtaaacagatgttacatctttcagggcatcacaccataggagtggtatgccttacatcacatgggagatgtgaatggcttataaggagtcccaaacactaggacaccagccagttgaggtctgacttcaagacagttgggtcttgcacagatggtagaaacagatggtagaatgtatatttgtgtatggggggagagggtgccctgtattccaccctttattccccccttgcattctgagactagagcttggcctatggcaccgacaattcctcagtcctgaataacatgtataggctacagcattgcctagttccataagtcaccctaatggttaaagttttgccacctgtcaccttaaaataccccaactttgaatggattctgaaccatagcctacgtgtttagaatgtctagtttgatggagcacagatggtttggggagcgctaacattcatctttactttgccttcatctattattttgcccaaacgtgtttatcctacagcctgcttactaatggctcagtttgttctagctagttgtggtttgggagtaggaggccactctgcccactgttagatgaggggattgtaaatgttagagagggccggggtagaggagtactctttttaagaaaagtagttgactttgataatgaaaaggtatcatcatgattatcgtcatgctgttgagtgctttactacatttcaggcacgataaggttatatatttaatacttacaactttatgagcagctgtcgtcattatcgccactttacaaatatggaaacccaggcaaaaagaggctaagtaactttgccaaggtctcacaggtagcaaattgcagagccagaatgcaaaactactgccttatgatctgcttctctaagtagctgggaatggagaaagacggcgagcagatgtatagaatgcactgattagggtgactgggtgagctctgtgctgagttatacttcaagatgtacaggacagagttagggaaatgtgagaccaagggcttttctgggcaggaacaaccatactggctgctgtggcaaggttagagcctgccaggtaactacagtgagacttccttttcatacagattgggggaactggcaagacaagttatcatcacctccacatagcaggtgagggaagggaagcaacagcagaggcattggtgttttgtatttagaagggcacatagcctaatgctaaaactcacccattagttacatcaatgtttggatgctctttgaaagacttctcaggagaggtgtgagaatgatttgatttgaaggtgggttttagtcttgaccgtgtgccacagcaaacaaaatgaaactccccttgagataaaggtaatcaagatgaaggtgtatttacaaagatgagcagtgggatttatccagtgactctggaaggtaatccccagatttagtgctccatgaataccttgccatgttcctaagctggtaaattactctgagttttatgagagcggattgtgggaagcatctagatgaaattcagcctgtttcacctcgagtccagggctcactaatgcaccccaggtgtgcagactgcccaggctttctgccttggaagcctcaaggaactttcatcccaaagggaagctttgaagaataccaaggacctttctatctgtccttgattttttgtcatttttctgcccacatttggtaattggagatatttgtggtgttaaagccggacttgttccttctcagcctgccccctccagtagtgaaattttaagcctgtggctttgattatgcaaagcagtgatttctctgcagtgtccctcagatgtaaaaggagaatgactgaaatactagaaaggaagttacgggaaatcaccaaacaaccattttccatgtctacagatcctttcatctgagggcaaaagaagctggagagggtgcctccaaaggtgggggtttggaggagcacaatttaaaattctctgggttgtaggctaaggatcaaagggttatgtcctcagaattacacggtgagtcactggaaaaactctgagtaaaagtcaggcatcctgttttccaatcttatatgcctaataatttcaactggctttaagacagtacatttatgtatatttttcatttagatccattgccacctaaagaatataatgatgtatgcattatatagattatggtttccatgccctagagcatcatgaggtgttttgccatgagaatacagtgggttaggtgaagaggtgcttgagaagccttggtgtctaatgtgtggtctcagtactctgtggaatctcctcctcccttacaaaccactgcctctattcaagccatcttgtgcttcaatttagaagttctcctttaagagagagttttccaaagctaaattaacagctatgcagtgtactgagtaactctgtgatttactttttccaattttgactgctgtaagcatttcagtttgtttcccactagtttggatcaacatgttggttttaactttatctccaaatgtaatgattttacatattatagacaaatgtgtttgcacagttaagggcagcaggatttgcttgaacagagaatatgtgagttctgtaacttttaatattcaattcaatttaaattctttttcatatgtcctttttatatattccagtttctgattatgggtaacctgacttgaaggtcagaccatctgaagtgaagatggttaaattgtatgtgtttgcacatgcatacacgtgtgtgtgtgtgtgcatgcatccacatacacatgggtgttcatgtggtaaaggagagccagagagatgtttaatttcctcaccacattgtagaaactgaaagagacatgtactgcagaaacaaattctgagatacgtttgctaaccacttttttaggtttcaccttccggggaaaatgttaaggcatttgcaaacatgcctagtttcttagcgatttaaggcgcatagactctctgtgactacacctagagaggtaagacatggaaaagaacataagctttgagccacctagattaggggcttaatctggccacaccactttttagatgtataacttcaggttgattactggacctgtattccttttctttccttggttgacacttgttccaacttatgatgttggtttatgattttgattttagtttggttaacttcttatttgggggattttgactgacttaatttgttctcatcttgtattagggttctctagaggggtagaactaacaggatagatgaatatatgaagggaaatttattaagtagtattgactcacacgatcacaaggtgaggtcccacaataggctctctgcaagctgaggagcaaggaagccagtccaagtcccaagacctcaaaagtagggaaaccaacagtgcagctttcagtctgtgtccaaaggcccaagagcccctggcaaatcactggtgtaagtcaggagtctaaaagctaaggaatttggagtctgatgttcaagcgcaggaagcatccagcacaggagaaagatgaaggcctatagactcagcaagtcaagtccaacttctgcctgcttctttctagccacactggcagctgattagatggtgcccaccaagattgagggtgggtctgcttctccaagtccactgactcaaatgtttaactttttggcaacaccctcacagacacacccaggaataatactttgcatccttcagtccaatcaggttgacactcagtattataaccgtcacacatctgttatcctattgatcctgattcttgacctctagccgcagttccattcagagaagattagaattgtttcagagttgggctaggcacgatggttcacacctgtaatcccagcacgttgaaagcccaaggtgggaggattgcttgagctcaggagtttgagaccagcctgcgcaatatagtgagaccccatcgctacaaaaaattttttaaattacctgggtaaggccgggcgtagtggctcaagcctgtaatcccagcactttgggaggccgaggcaagctgatcacgaggtcaggagattgagaccatcctggctaacatggtgaaaccccgtctctattaaaatacaaaaaattaggcgggcgtggtggcgggcacctgtagtcccagctactcgggggggtgaggcaggagaatggcatgaacctgggagacagagcttgcagtgagcggagatcacgccactgcactccagcctgggcgacagagggagactccatctcaaaaaaaaaaaaaaaaaattacccgggtatggtggcatgcacctgtacttggatgtcccagtggcatgctcccagctacttgggaggctgatgtgggaggatcacttgaacccaagagtgcaaggttatagtgagattttttaaaaaaagttattttttgagacaggatctcactgtctcatccaggctggagtgcagtggtgcaatcacagctcactacaacctctgcctcctgggctcaagcaatccttccatctcagcctcctgagtagctgggactacaggtgcataccaccatgcctggctaatattttgtattcttttttcttttgtagagacagggtttcgccatgttacccaggctggtcttaaactcctaaactcaaacaatccacctgcctcatcttcccaaagtgctgggattacaggcgtgagccactgtgccttactgcttagagtgagtttgctactgcaccactccagccagccagggtgatagagcaaggccctgtctaaaaaaaaaaaaaaaacaaaaaaaaaaaaacaggaagaagaagaaggagaacaattgtttcagagttaaaaagaatcttaaaaatcattgtgcttgacaacaatttttatgctgcaggtgcttctctccaaagaccattggtaagtttacctgtaaatggaaacaaaatatgaacaatccccaaatctgtgtttctgaagatttattctttctaatgcttgagcattttgaaagagagacagattaataagaaggaagaggcttcctagtatgagggaaagtgttcatgagttttagtcctagctttgactctcattacacatgtgaaaattttctcatctttaaacaggcttaaatacaaagaataactgaaaaatattggaaacctaagtggttataatgttgtatctagtagtgggactaggagtgattctttgtttggtttggttctgtttttatttccaaattttatgcactgggagtgtactccttttgtatttactacttcacccccaccagccaaaatgtcttaaaatgtaaaatcatgaaaaataaaaggatagggatgattttcagccccactacctcatagggtttctatgaaaatcagatgaaacaatgtaagactgcgcattgaaaaataaataataactacataataaagtattgccaacatgttagatttagccttaaagaaattcagtttctgtatagggcaagtggagtggcatgcaaattcttgaatctcttgaattcatcatttcagtttgctattcctgcaagaggaaggaattccatagatccaaaatgcatatctatttgtcgcaaagacaataactaaagattatttgctgctactacagactgatagcaaatttatcagcattaaaataattattttaaaggctacaggaaaaacatgatcatggcaaggaattatatcatgttcttgagtagattagggagaaagaatagaattcaggcagacgaggcttgcctatggtccccaacctttttttgacaccagggaccagttttgtggaagacaatttttccgtggatgggggcgggggtggtggtttcaggatgaaactgttccacttcagatcatcaggcattaaattctcataaagagcacacaacctagatccctcaaatgtgcagttcacaataggattcgtgttcctaagagaatctaactctgccactgatctgacaggaggtgaagttcacctcctgttgtgtggcccagttcctaacaggccacagaccagtgttggtccatggcctgggggtacccctgcacaaatctaaaaactctccctttgaggcatcacattacccaactggaaactatagtataaggctgcagtaagcaaaacagcatggtactggtacagaagcaaacacattaaccagtggaacagaatagagaaccctgaaataaagccacacacctacagatgtctaatcttcaacaaagctgacaaaaataagcaatggggaaaggactcactggtcaataaatactgctggggttgttggctagccatatgcagaagaatgaaaccagacccctacctttcaccatatgcaaaaattgactcaagatggattaaagatttaaatgtaagaccttgaaatataagaatcctagaagaaaacctaggaaataccattttgtacatgggctttggtaaagaatttatgactaagtcctcaaagcaattggaacaaaaacaaaaattgacagatgggacctaattaaactaaaaagcttctgcacagcaaaagaaactatcaacagagtaaacagacaacctacagatagggagaaaatattcacaaactatgcatctgacaaaggtgtaatatccaaattctgttaggaacttattgaacagttgaacagcaaaacccaaataacactattaaaagatgggcaaaagacatgagaagacacttctcaaaagaagacatacaagcaaccaacaaacatatgaaaaaatacttattatcactaatcatcagagaaatgcaaatcaaaaccacaatgagataccatcttacaccagtcagaatggctgctattaaaaagccaaaaaacaacatgttggcaagactgcagagaaaaggaatgcatgtacactgttggtgggaatgtaaattatttcagccactgtggaaagcagtttggagatttctcaaagaacctaaaacagaattatcatttgacccagcaattccattactgggtatatatccaatagaaaacaaatttttctacgaaaaagacacatacatatactcacatgttcatcgcagcactattcacgatagcaaagacatggaatcagcctaggtgcccatctgataaagaaaatatggtacatatagaccatggaatactatgcagccataaaaagaatgaagtcatgtcctttgcagcaacatggatgcagctggaggccattatcctaagtgaattaaggcaggaacacgaaaccaaataccgcacattctcacttataagtggaagctaaacattaagtactcaagaacataaagatggcaacagtcaacactgggaactactagagaagggagggaggaattggggagaagggttgaaaaactaactgttgagtgctgttctcagtacctaaataaggggatcattcataccgcaaacctcagcatcacactatatatccaggtaacaaacttgcacatgtatcccctgaatctaaaataaaagttgaaaaagaaaaaaaaaagaactatccctttgggatgttatgctgaccacatagaaatgtgggaaacctgcttgttagtggtgacacccacatggaagtgcttattttacttatccaacttcccacaacctttgtgattatgggccaccatcaagagatctcatttaaattacatttatccttcatatgcttttatgtttgtaaaagtaatacatacccttaaaattcagacctttcagagatacactatggaggaagggaaaaagttccccataatcttagacttaactgatattagcatgtttgtatacagtccttcaaattttttcaatgcgtatattaacatatttagtattcatttgcttcacaaagaatgtgtttatatattatatactgttttgcatctttttctcttaatacattttggacatatttttattttatttgtttatttttctttgttttttgaggtgaagtcttgctctgtcacccaggctggagtgcagtggcgcaatctcggctcactgcaacctccacctcctgggtcaaagctattctcctgcctcagcctcctgagtagttggtattacaggtgcacgccacgatggccagctaatttttgtatttttagtagagatggggtttcaccatgttaaccaagctggtcttgaactcctgacctcaagtcatccacccgcctcagcctcccaaagtgctgggattacaggcctgagccaccactcccggcctggacatattttataaaaccctttgtaataccagttgtcttaatttttcatattctttcagagtcatttagtccgtgatttcagtggtacatgtcttacaaagttaaaaaggagagctggatagtgatttctttttttttttctttgttgttcttcttttttctttttccttcttcccttcttcctttttttcttcctcctcctccctccattacctcctcccttctgtccctcctcccccctcctcctttctccccttctctccttgtttttccctcctcccccttccctttctcccatctttcttctttctcctcttctttcttcttcttttaggtaagaaagagttttttggaatgatctttcagaagcagttgctataggcaacaatattaggtttgtctatggctctacttttgtattagccaatccattacttgtgattgttgtgttgataatgggaatcgtgaattgattacttcatcaaagcaattttttccacactgacattctttctagcaatgaacttgtgaaatcaaatggaatttagaggtgatgctcctctgttttggaaaggtggaatgagttatccacctagaaacaaatctgatctagtcactctcctatttagagacttcttttgacttcttctctaaagaatagaatccaaatttattctcttagtttgtaagattttcttgggtcacctctctagccatgtatgtgcttcagacacactgatttcttgctgttcctcatccttgtgttttgcatcgacttttcttccactaggatgctttttgccagcttctctgcttggtgaaactcgtatgtttatagctctttgataaggctttgctcctccccctaggcacaactcctcctccttgttctctacttctattgtagtggttctgctgctatagtttaacttaccttaccagtcctaatctttcttttaattttttattgtgtaatttattgctgcatatgtattatattttacaataattaatattatatatttgttactatataatttacatatcgtaaagtacacaaatcataagtatacagttgatgtatttgccaggtctgaatttgtacctgggctgtgagccttcagagggtaggaacaatattttagtcattcttatatcaccagaggtactcaataagtacttgaatatgagcgaccactacataatttcctcagttcatctagtgtctatttctttatggaaaggggacattaacaagtatttttttgtagatgtttcaaaccaagtaatatttgtttactgtcttgctactaatctcaaaagttgagagattcaacctaaaatattgatttcctagtggcaattatagatcagtgactaaaaacaaatttcatccatttttctactcacttgataatgttttattagaaactataaatcttaagacttgaggtattaaacagcagagagatatggttaggatcaaacttccttttcctcactatttattccttatagaaaaaaagcaactaccccttcccttaaatttattattattattattatttgtgatggagtttcactctgtcacccaggctggaatgttgtggcatgatctcggctcactacaacctctgcctcagggttcaagcaattctcctgtctcagcctcctgagtaactgggattacaggcacccaccaccatgcccgactaatttttgtatttttagtagagattagatttcacgatgttgatcaggctggccttgaactcctggcctcagatgatccacctgccttagcctcccaaagtgctgggattacaggcatgagccactgcacctggcctcccttaaatttaaattcccttaaatattccttttgaaagatgctttttaccattgctaaagaagtggaatgatttcaaattaatttcaaaataatttcaaattaatttcaaaattctcccactaaaagttgctgacatattaaaggaaatgatatttatgcatgttttctaaaagctagatgtagaaaacttgctcggagtaatttgattcaacaaaagagtttagtagttttccttgaaagataatcctgaaatcaatacctttaatttacattaggcactcaaagaaaataaacacatttccctacttaaaaggctggtccaggtactttttttgtgctagaaaatcaaggctgaaatatctttactttgtattgattcagattttaaattgttctttgaaaagtatatatggaaacagatttttaaaaatgtataaatagataaacatgtataagcagagttttaaatgtatagaaaaacagattcaaaaaacatgtccaccaaatggacatcttttcctactatattcagtaacctaaatgaccctatcccttctcagcttatcttaattttagtatacagttgcccttcttccattaattaatcaataagctcattcattcacataatcagtcattgttgatgcctgttatatccaaggcactctatattctatatgctttatattctatgtactctatattctggagacatcaagaagaaaagttcagattaaaattttcctgactccatttttaaaaagttagtttttacttttatggttaattgtcttaatttaacaagtgtccatttaggatgtaatctgtgctcagtactgttgtacatcatgatctatattctctctagaagctagcattttatcccattgatttaaataatgtctaatgaattttaagttcttcatgtggttagtgttttacattttatgagtaataatgaaatggaagattcaagcaaactccattttcctgagaaatatgcatctctttatttcccaatgttaattatctaaatgctgttagttaatgctatattactacaagctttttttaaaaaaagagacaatatcctttcttaaaagaatgttataaatataaaaaagtacttgtgttaaataaatgttattgttcatttttagagaaatcgagtgttttcttggcagagatgggagaagaaatgtaattgcttaaataattaagtattcatgcttggaaacccaacttctgttgcagggttaacatatgaactggtgattaactgacaaaaattaagcatatgtgtttgggtcatggtttctgtggaggccatagatttgctttatggaaacttgagcttctgtataacagagtttgaaaccattacatgatcaggtcatttagtaggacaacccaataaaaggtaacttgaggccccatgataagaaagtgtctaagaactaagtgatatggttacttaccaattaaaatgagaaaagtcatactcttttagttttcatctgttatggtcatggggaaaatatttctttgaattcggtcctgaacccatctgagacttggggaacattagcagcttctcagtgcatactttctagggaaggagataatggaagaccctttcttcctgtcttctgtggtctctcttgggagcccaggtcttactcagaataggttctcatacttagaggaaactcagattgctttggtcttagcctgtaaatcaaagggtgaagactttttctgttttccttaagagagttctgccctcagtagagggcagagaaagaatatgtgtcattaatcacttgagaattgtttacaactataatctagagagcacttacttgcccatggcaggcagtaaagttaccttggttgtgtaagaataacctgagtggtttactcagactgttcacaaatgtttggacatcattcaagggctgtccaagtctgactagttagctttatgatatactcagatacactcagattcacctttataccatccaatcacatttaaaggagggtgtttcctgaaattgcaacattactgacttcccagccatgtgacatagcttttcagactctaagttaaattttaacccagacatctctcttcaattcaggtcacctacaggccagacaaagccaaggtcatgtattgagtgaatataaggagttttgttggttctaataactgtaatgttattcactggttgaaatactataccatggttaatcataagttgcagctgttgtgtccttttatttatgagcccttaatcaagaggacacagcaagagccactgtttgaaaggagcctttcatgaggtcttctctttgggtgctccttcttgtttcattgtgaaaagaagagaagtttatattgccttgcaaaagttattaaatagtatatgttggcttctctgaaaacagatttttctattccaaatttgaaagatcaaattataatctttatatttcagctgatgataatagaaacactaagcctgtgctctccaaacaatgtcttttaattggtgccaagtttgattgaatctcaatatcagccatcagaagttatatgttggctctctgaaaacagactttcctatccagaattcaggttttctatttgtgacaatatgtctctgctgatgttaaggtaaacagaccagagctctttgtgcagccctttttactggtcctgaacctgatgaatgagattttaaatgtaagtcaatctctctctccttttttaactttttggttttaaatcctcccttattttatgagaattcatcttatgagttacccttgttaaaatattggcatatccaggagtttgaatagggtcattttctgaatggattttggaataattacgtaaattgatttttctgatcaaggaatttagtgataggttatattttcaaatgtgttgattgtcagcttcatcctaaattgcaatgtaacacaaaagctggtacacagctcttttctttgagacactcaaaatgtttccaaactttaaattcatactttttactgataacatttttgtggatctcattcaggtaaacttttcttcttcacttgttgatcccgcgtgacccctccagccacacaggtttcatgtgcttccctgaatacagcatgcacttagcaccctttatagcctggatagtgttgttaccccagactagaattctttcctcatctccattacaatacttgacatccttcaagacaacactcaaatgctacttatatcattaaatttcctccctgatttctacttggacttaaatgttgctctttgtaccactttatttgacctgttgctgaagcacttagttcactgtaccttgtattttaattgattttgtacatgttttttccctcaacaagaagcaaacttattgaggtctgggaccatatcttcaagcagcctccagataattggcttggcacaaagttgcatgcatctcttgttttctcataactggatggaaacaatgatatttagatttatcagaactgctacagagggctaaagggatgcaaaaacacttggtaaaattcaaaattctctttaaagtagtcagtattgttctcaaaacaattacatcaaacttttagtgactgaagtgttgtaataatttgtgattttcaaagatactcaaaatttaaggtgaacagtgagccagaacacaagatgatacacctaatctcattcaccagtctgttttgaccaagtcaagttgaggcaagaatgctgggaacaagcttttctgattgaatgtgttaatttagcccgccttcaaacttcttaaccaatggcttccactctaccacctttcaacgcttttttttctgtaagatggcatgttatctgttagaaataatggggatcacattcattataccagcagtagtctctctgtgatcacactcattagactgtttactaccacgaattctgggagaaatggcctgggacattaaaagaaacaaacaagctaagagggctgtctaggaccaatgacagttattggatttgttttaagaattaagcttatgagttacacttttttcctttgcagcatagatgaaaatcatcacttgaggaacatttcaacatcatagttgcaagtataacttacacaatggaaaatgtttttcattttgagaagaggcaattgctattttgtaatggaacgcaaggactactggagataaaacttgcatgcaagaccagtacagcttgatgaagggagcagagtctagtttaacctctaaattaggagatgtttgttttaattttactgctattccaggcaagaaatattaagtgtctgctgtgttcaggactgctaaacattatggacaatacagtaatagtagaagacatggtgtctgcccttgagggagtgaaaattgaatagacaactcttaactatcaggatcaacaaaaaaatggtgttagttagggagtaataaaagtgccacacggctaactacaaaccagaaggccagggacggattactgtgaactcagctgctgtgtagctttgagtttcttgaatattgtccatgacccatttattttgttttaaatagagaattatatctgccctctaccaaatacacaggaataatctgagtaatgtttataactgtgatctgagaactttttgagtcttttgcaaatctgtaaacacagagtgagaatgagatatgacagtgtggtaaaagaggacttttgagatttattaatatttagaagtacaagggggaagaatacttttatagtatgattataatgttaaagatattcttcctttagttttataaaatgtggcttttgatcagtaagtggcaacttagaagaaaagtctatcctaagttgatttgctattccttgaccttaagaactatagaacactttattttctcctaagaccacttttttgtttttattttactccattcattaattcattcagcacataataacgaagtatgtacttggtggcaagcactgtggtaggacctggggatatgaagttgaagaagacctgggccatatctctaaaaaccttgtgaggggaaaccaagggggaaaaagtttctactattttaaataattagaatagattttattttatagttaaatttgaagaaaactacaattttagttagatttactatgccatctttactcatttgttcactcccattcgttcatttttcaagttaatgggtgctggaaacctgagtcatccttgacatgtccctttcatttgccctccaaatgcaaacaaccacctgttgtttcagtcctttcaaatgcctgcctccagaatgagcattaaatctgtcaacatatttaccatctcagcttctccagtcacctcctaactgcctcccagtttccactcttacttacctctaattaacagctttcagacttttttgaggatgacctacaattaaaaaatacatccatgatactcccagtacacatacttgtgttgctatgtatctataagtaaatccaaaatcaaagattaacagaataatacgtatcttttctcagtatcatgcattttgatatttttaaaaattatattcctggccgggcatggtagcttacacctgtaatcccagcactttgggaggctgaggcaggtggatcacctgaggtcaggagttcgagaccagcctgaccagcagggagaaaacctgtccctactaaaaatacaaaattagccaggcatggtggcacatgcctgtaaacccagctacttgggaggctgaggcaggagaatcccttgaacccaggaggcagaggttgtggtgagccgagatcacaccattgcactccagcctgggccacaagagcagagctctgtttcaaaaaaaaaaaaaaaaaaacaattaggggccaggtgcaatggctcatgcctgtaatcccagcactttgggtggatcacgaggtcaggagttcaagaccatcctggctgacaaggtgaaacactctctactaaaaatacaaaaagattagctgggcgtggtggcaggcgcctgtagtcccagctacttgggaggctgaggcaggagaatcgcttggagcttgcagtaagcagagatcgcgccactgcactccagcctgggcgacagagtgagactccatctcaaaaaaaaaaaaaaaaattatattcctttgtcgctttcttgctgggcatgattaattaaattcactttatgatccattaatgatgtgaaatttactgttctaatacttttaaacacaggttgtttaaagccagggtgataggtttatattatttccctgcttaaaatgtttcattggcttctggttgtacttttagaattcaacgtagaaatcattgtatggcctacaaagtcctgcatggtcccactctgcctcctcctcactctttcctacttctccacatcttcacacaggttctttcctctccatggaataatagtcttccttccccaatcttcaccttgccaattgctattatcctatgggtctctgtgtaaaaatcactcctttaagaaaattagatctccccttataattcctcttcctcctctttttattcactgtatttattataattgtataattatatatttatttgtatgacttttttatttaatattagtggcccacactagattacaggttccccgatatctaagaccagatctgttttgtttattgctatatctacaatacctggtatagtcctagcataatcagcaaatattcttggtatgaactttggatcaaatgctatgcttgccccacaaaggtgaataaaacatagactttattctcaaggagttctactcttttgacatggagtatactttgtttgaagacaggtatctaaaagacaaaacaggttaataaacatcttagaaagggtattagaatgctggaaatcctataaacaatggcttctttagtttaagactctaactggagggaagttttccttatttactcatgatactaactcaaggaaatgcaatgattttttttaaaggaagcagagatattattcttttattgaggtaaaatttctagagattgaaatgcacagatcttaagtggacaattcaatgagctttgaaaaaaatattttcttgtgttcccttccagtcaatctcaagcctccttaggcaatcactcttctgatttctatcactacagattagtttttcctgtgctcgaaactcacatacgtagaaatcaagcactgatatctggcttctttcagacggcctttctttttagatttatccatgttttgtgtgtattttttgttaattccttttttagtaatgagtagtatgccattgtaaaaatataagacaattactttttagccattcttttagggatagatatgtgggtaattttcactttagggttattatgaataatgccattatgaatatgcttatacaagttctgtttttgaaattggtgggtcagaggatagacgaatgtttaactctaaaataaagtgccaaactgtttccaaagtaggttatacaaattttccattaccaacagaaatataaaataattatgtttgttctacagtttcactaagagcttttttctttaattttagacattccagtaagcttgaaacagtcttgcactgtaattttaattttgatttcactgatgactaatgatattgaataccttttcatgtgcttattaagcactcacatattcttttgtgaagtgtttcttcaatcttttgatcagttttattggctgtttgtctttttattgttggttttggaagtttttaaaaatatattctgaatataagtcctttttcagatatatgtactataactatgtcctcgcagtccgtggcttgtcattttaccttcttactggtgtctttattgagcaagttttaattaaaatggttagttctttttatagccttttaaagaaatctttgtcaacctcatggttgcagcaatcttcttctacacctttttctagaagctttattgtttcatctcttatgtttatgatcaatcctgaattaatctctatgtgtgtcatgaggtagctatcaaggttcatttttttcccatatatttttccagcgttctctagctatcttttgaagggttttctctttttattaaattatcttggagcctttgtaaaaattatcaatttactgcatatgctttactctaactggactctccatttcgttccacagcaggatttgctatctttacaccactcctatgttgcttaggctctgaggctttatactaagtcttaatatcaggtagtgcgagttctctgactttgtgagttttttaaaaaatcaatttttttggtataaatattttgcacttcatataaattttagattcagcctgaaaattttgagaaaaaactattaagttttcactgggattgtaatgaatctgtgttgaactcagggtgaattgacatctttaataatatggaattttccatgaccatgatcatgttttctctcccaattgattaggtctcctttaatttcactcagaaatatcttatggttctcagtgcagaggattgtgatggtattttgaatgactatgaataaatttttggctgatatattaagtcaataatagatacctttgatttttattattatttctatattattatgcagttctcagccttgaagtttgaaagactttaataagacattgacaccagtctcccacttaatgctggaatgctcaattacaaatccctggcaaatgttcattagactttgaactcttccaatgctggagaaataactgttacacaaaacaccctattccatttggggacagtttgaattgttggaaacgttctttttatattgagctagttttctgcctgttgtctgccctttggagtcatggagatgagtttgccctctctcctacagagtaccctccagctattcgtagatagctaatctgcccaatgaattcttttttcttgttgaaacaattctagtttctctacttattcctcgcatgacatgatttttgtatcttttctctttctctgactcttttgacatgctccagttttctgtattttctttaacttttggcatccagaatagaagcaacactccaactgtgtccagaccagtgcagagcacagaaagactattttttttccttactctgaacactatacttctgctaatctggccttaaatatcatcagggttttcagcagccaagtcacactgttggctcatgtaatgttcactgtcagctaaaacccctagatctttttcacatgaactcttattcagactgctcattctttcatcctgaacttaggcctgtaatagttttctttcttgtgttcatgtaatagagtttacatttattcccattcagtctcagaacttcagaccaatcttctagtcagtcttttgtggagtctataggcttgacaaaagaaaaaactcagactccagtgaataccacaaacagttatttgctttaggttcaggaaatgaaaacgtgctggttttaagtttctgaagttgcctccctccttcatctcattccgtcctcccccttcagttctttggtccgagacccaatagaggatgtctacagccactctccctctagggagggcctgggtctcatcttccacccactgccattcaataatagcttgggtctgtcttggctaagccaagggaacatccagcttcactgagaaaacctttgctgcatggtgatacgccacctacttgcactgtagcgttgtctggcaggtttggcccattgtctcccagaggaaacagaaaacaactccccagcaacccgccaatctcttttgtccccacagtcgagctctggaaaatatctgaatgccacagaagtgggagtaccctttgatgtttatattggctggctccttttcctttttgctttttctttttttcatttaataatcagggtagtagaaaatgcggagaattaaccgcatgacagcagcagaggaattcattagagaaacagagatgaattctgctcagatttcaggctctcaggcagaagacacaaaggagtaatcgtcttctagttttttttaatcatttcttttgtggcaccttccttgtccatgaaggcaatctcagcgtctggcatgggggagcccaagaacataggcagtgcaaatggtggctttgatttggggattattacagcaatattaaccacttccttcttacctctctttgaaaagatggagcttgtcattcttggagaaggcagtgaacagtgctatgttattgcttttatttaaagtattacccactaaaacttcattttaaaattgggaaaaatgtgcataacattttactatggaaaattcttgaacagagcaaaaaatgctgaggaatataattttgcaaatgtgttctcttctaacttaatatcctcagagacccttccttttatgagcctcaaagacagctttagtgatggcttacacaaaactaagtaaatttacgcatacaattttacttgaaggaagttggtaaaataaatcaataatttttttttcttcttgagacagagtgtcactctgtcacccaggctggagtgcagtggtgtgatcacggctcactgtagcctcaaccttgcaggttcaagtgatcctcccacctcagcctcccaagtaactgggatcacaggcatgtgccactatgcctagctaatttttttttttatttttagtagagatgaggtctcgctatgttgcccaggccggtctcaaactcctggactcgagcaatcctcccgccttggtctcccaaagtgggattacaggtgtaagctaccatgcccatccacatggttttttctataattgtacaaaggcagcagctggatccccagaagctactggtaatactaagatttccctcccaaagtcgaaagtagtcctgattgctttgcttaagtagtagagtttcattactattttaattcctcatgaattttttaaaaaatacaaatcatattcggagtttcatattgaaattatttaagagaaaatttttttctcaagtactgttacacactttaaaagcgtgtatgtaatttattgattttataaatataaatgatttgcatcttatgagagcaagttctataaagctctttcttggttacaatttttagcatggttttatttttaagtaaacatatctacctgaaagcaatgaaaagaacagttttgaatcttagtgatatttctggaaagagaactcattaacctgaagtactcatgcatataattaatttaaaaaccatttggttttaaccttaagctaatccaatcaacttgtgctttcatcaaacatttaaggcctaacagggacaggtctggtatcacaaaaactttcccagggaatactcttcttatggctcatcttaggacataggctgtagaactatgtcctagaaccagaccattagcaagtaagtcaccttttcataccatgtttctcctacctgtcaagcgaagatgcaggcacttgccacctgtcaatgggagaaaatactgtatatcaatcttttttatatcagtgataaggaggaaggatagtgatgactgtggcctgtagagggtatagggaaggctctgtggaagaggagagatttaaataaggcttacaagaatatgtaggatgttagtcaatgaccgttttttgagaatattgataaaaaggcatttaagatatgttgcctgcttctgatttggattggcatagaaaaggcatgaagacaacatcagaaagggagtaaaagcacaggtgtgtcaaagcacatgcaggcatatcttggagatattgagggattggttccagaccaccacaataaagtgaatatggagaaaaactgaatattgtaataaaggtactcacacaatttttttggtttcctagtgcatatcaaagttatgttaatgctatactgtagactcttaagtgtacagtaccattatgtctaaaaaaccaatgtatatactttaattaaaaataatttattgctaaaaaatgctaataatcatctgagccttcagtgagttgtaatctttttgctggtggagtgttttgcctggatgttagtggctgctctctgatcacggtggtggttactgaaggttggggtggatgtgccactttctcaaaacaagtcaacagtgaagtttactgcattaatagactcttcctttcatgaaatattgctctatagcatgtcataatgtttgataacacttaacccatagtagaactttaaaaatttgagtcagtcctctcaaaccctgctgttgccttatcaactacgtttatataatattctgaatcctttgttgtcatttcaatgatgttcacagcaccttcaccaggagtagatcccatctcaagaaactactttctttgttcattcatatgaagcaacgtcttttttttttttttttttttttttgagacggagttttgctcttgttgcccaggctggagtgcaatggtgtgatcttggttcaccgcagcctctgcttcccgggttaaagcgattctcctgcctcagcctcctcagtagctgggattacaggtgtgtgcctccacacctggctaattttgtatttttagtagagacggggtttctccatgttggtcaggctggtctcgaactcccaacctcaggtgatctgcccacctcagcctcacaaagtgctgggattacaagcatgagccactgcgcccaggcatgaatcaacttctcatcagattttatcatgagattgcagcaattcagtcacagcttcaggctctacttctaattctagttcttttactatttccttcacatctgcagtgacttcatccagtcttaaacccctcagagtcatccctgagggttggaatcagtttctttaaaactcctgtttatgctgatattttgacctcctcccatgaatcatgaatgttcttaatggcacctagaattgtgaatcttttccagaacgttcccaatttatatattttgtgaagatccatcaggggaatcactatctgtggcagctataaccttacaaaaatttatttcttaaatattaagacttgaatgttgaaattattcctcgacacatgggatacagaatcaggcatgaaaacaaccttaatcttatgtatctccatcagagctcttgggtgactaggaacattgtcaatgagcagtactattttgaaagaaatctttttctctgagcagtaggtctcaacagtgtgtttaaaatattcattaagacatactgtaaacagatgtgctgccatccagactttgtcgttccacttctagagcacaggcaaagtagcttttgcataaatcttagggactctgggttttcagaatggtaaatgatcattggcttcaagttagagtcatcagctgcattagcccctaccgagagagtcagcctgtcttttgaagctctgaagctaggcattgacttctgctcttgagctttgacagtctgagatggcaccttcttccaatatgaggctattttgtctacatgaaaaatctgttgtttagttgagtcgccttcatcaatgatcttagctagatcttctggataaatttctgcaacttctacatcagcacttgctgcttcactttgtatttgtatgttacagaggtggcctctttccttaaacaactcatgaagcaacccctgctaacttccaacttttcttctgcagctttctgatctctttcagcctttgtagaattgaagagttaagcccttgctctggattagactttggcttaagggaatgttgtggctggtttggtcttctagctaaactactaaaattctccctatgagcaataaggttgttttgccttcttatcattcatgtgttcattggagtagcacttctaatttccttcatgaacttttgctttgcattcataacttggccaactgtttggcacaagaggcctagcttcctgcctgattcagcttttgactttccctcactaagctaaattatctctaacttttgatttaaaatgagagaagtgtgattctttctttcacttgaacacttagaggctattgtaaggttattaattgaactaatttcaatattggtattgtctcagggaatagagaggcccaaggagtgggaaaaagatggggaaatagctggccaatggagcagtcagaatacacatatttatcaattaaatttgctgtcatatatgagtgtagttcatggcacccacaaacaatgacaagaataacatcaaagatcactgatcacaggtcaccataataacataatcataattgaaaaagttagaaatattgtgagaattaccaaatatcacacagagacatgcatgagcacatgctattggaaaaatggcactaatagacttgtttgatgcagagttgccacaaccttcaatttgtaaaagttgaagtatctgtgaagcacgataaagtggagtacaataaagtaaggtatgtctctagtgtgtttgtgtacattaagtggtggaagatgtgatttaattttttaaaaaatagccgtttaccctagataaatcagtaagagatgagtacaagtatgtatctacaaattatttttatttgtgctctttataagaattaaaaattgaaaaactcccaaataattaatgaagtaaattatctttcaagtatacactgtattgttctatagctattaaaaatcatattgtataaaaatatttattcaaatggggaaatactcatgatataggaagaagtgaaaagtaggttataaaacagaatgtatagtatggtccccattttgggaaatatatttacacttatgacaataaaaaaatcagacaggatacataatgagttgttagcagtggttatatatactctgagaccatgagttattttgatttttgagaggcgagtgtgcttgttggtgttttcaactctttcctaccataaaatgtattaattcactattcaatttttttaagttctaagaagttagacacttatttattttaggtgttatacagtccatagtggaaatttgagatgagtgacagaatgaaaataatatggttgcagacaaatgtgataaatatgtgtaagatgtttttgaatagacaaagcctattttaggagtgatgaattgtagcaataatttattgtaaaatgatagatgtttgaaatagggtgggagtggtaggaattcaaaggaagggatagatatgaaacatgaaggatgaatgggcagtatgtggtgaaatggctctgagaggtgagagagagaagactcttgaggacaagtgcaatgtttcaacctgcttaggataataaagccaataaaagatagagacagcttgtttgggggctgagataaaaggtttcaatccaggcttttttggttgttttttgtgttgttttcttttcttttcttttcttttttttttactttttatttggaagtaagaaagttgcaagaatgaaaacagtccacataacagtcaaatacctttacccatattcacctgttgctaatattttaccacatttgctttataatttactcgatctacatatgcatatatatgtataatatttttctgagccatttgaggctaaattacattcatcatgattctatacccccaaatacttcggtgtggtatttccaagaaaggggatattctgttatataaccttagtagagttatcaactttggtaaatttgattaaatacttctatctaatctaccatttatatgccagttttgtcagttggctcaaagatacaatagtgttgtttatagcactttttccctccagcataggatccagcataggattaggtattgcctttagttgtcatgttcctttagtctcctttaatctggaacatgtctacagcctttatcttttatgactttgtcagttttaaagaatttaagccccccctcttgctttttaaaaatttgtctgatgtttccttatgattagaatcaggttatgccttgtcatccaggtgatgttttgtccttgagttatcacatctgcaggcacataatgtccatctcccactcatggtgatgtaaattttgatctccaggtcaaggcattgtctaatttttcctttgtgtaggtactgtttttcctttaaaagcactgagtaatcagtgggaaacaaatagcttgctcttcatcactacccccaaatttattatctgttgatgattcttgtatagtccaaactttataagatgactgaaaaatcatgattttccatctttgacattccttccacattcgcctgtcaacagtagacattttctaataagcaggagctttttcttctctccatccaaacatgcatctcttaccagtttgtactggtcatggaatccactgttcttttcagtggttgatactgtaccagatcattttggtatataaactgtctcagatttagccagtatgttctggtatcatatctccaccgtctatttttttttttttaacacttccttgatttttggcataagttattctaggcacaccttgtacctactctgcctaagctctgaaatcacccattttcccaagaaaccccagttctttttttttttttttttttgagacggagtctcactctgtcacccaggcggttatgcagtggcgcgatctcggctcactgcaagccccgcctcccgggttcatgccattctcctgcctcagcctcccaagtagctgggactacaggcgcccgccaacgcgcccggctaatttttttatatttttagtagagacagggtttcaccctgttagccaggatagtctcgatctcctgacctcatgatccgcccgccttggcctcccaaagtgctgggattacaggcttgagccaccgcacccggccaccccagttcttttctggtggaaatagtgttaaagactaagttctgggcataggtgtgctcattactattgaggtatcttggctcttggctctttcagtgaagtgaacttggggaaaaatacacacacacacacacatacatatatatataaatacacacacatatacacctacatatgcatatatgcatattttagaaatcatgaattgattcattgatatctccaattttaattcattcccacaggtttcttacttgcccaattcagttttacatggcttctgaatttgaaataataaggcaaaatggtagagatgttcagcttgcagtgggggaagatagaaaatcgaaattcacatgacagggtgaagcatagtgattaagattaggaagtcatccacacagagttaggagaaaatacatctagagtttgccaaatccaaaggcaagactgtaagaaaaagatactaaaagagaaaagagcagaggatgtctctgcattttgtgatacattaaaaagttatggtaggagaaggagataaattaagaatagcctggggaaagagatgtagagagtgaagtcaaagaagcaggggagccagtactaggtagagtcatggtggtcaggattagaaagaattccagcagtccaatactgcagaatagtcaaggaaaattgaagaccgagactgggcctttggatttgatatttggttaccaaaggtttttaaatctggatttaggaactcatttgagattttttttttgagaatataacttttaaataacaagtcagctcacgttaattaatgtttaatgttttggggacatttacatttagcttttcttaaccttttaaatgtgttcactaaatattattttatttctaactgcaggctaagcaagttatactgtgtgtataaagtgcccaagtctaagaggcattgtagacaggctatttttagggaaactcatgtttttctttaaaagttcagctagcatttggaatcgatatacagtataatatttaaaaaaaaaacaacatatttcctcatcccccaagaggtttcttaaaatagcatgtaatcttacctacagtgggaaaagcctcaaattttataaattgggttggatctaacccagattacctgaccaagagagtccccaagaaaaacaaggtgtggtaaaggttatagtaatggtaattaagaaagttgtgttgtgcctgctgggcctcactaaaagcaatgacccagcctgtggctactggcatcattttgactgctgagacatgctttcttttggagagaagtccaaaccaaatctttgcccactttgaaagccaagatattctcattcctttcagccacagaaagggctggtttttctaacaggatcatgtccgtgtgaccttctgatgtatcaacttgttttctatgcagtatataaacaataaagggtttaattttagttgcttttcttcacagagtcatggaatattacaaatgttagaagctagagaggatctttgaggttatctgctttaagccccttgctttccacaggaaaacaccaaggctcagagagataaaatgtgtccatgctggacacagctggaaaatgatagagcttgaactcaggttaactgaccctccatgcaggtctgtggctgcaccatacattacagcatctctattcaacagtaaaactcattggggttatatattataccctagtggatattacatctgtgggatgacaagctgcattatgatagagttgcactgtgctcagcagcagttgagtagccagcacccacaggcaacctctatgggcaatctgaaagtgaaatctttactgaattgaatggaatctgtggagatcttcgatagtcttcccttgaggtgaaatcttgttttgttgagtggtttaagatgttttctagggtgtagcactttgcagaagtgctttcctctttcatgataggtgacccagtttggagatcaggaagattttgtcatccttcacattgcaagacttgaagacttgcaactcaaaatggtatatttttttcttttcttccaatagagaacaattccactctagcactcaagtatctaatacttttgggacatgttgaaactgtttccatttcatctgatttcactcagcaattatttatagaactctctgtgaggtaggcaccatgctaagtatcctgaggctgacaaagacatcctttctaagttgaggcagtgacagagggcacagcagccattgctaattgtccttgctgcagccttgttgggtgacacctctggcttccagggcctcatattttcacagcttcactgataactctctgagaggaattgtccctcccactaagattcccttctagaagatgagtttttccatgagcattttaaaattttctttgttgccttgttcatttttttttccaacatttaaaagagcagaagtgagggcgaagagaaaggagaatatttagatctgaaaaatgcaccagtccacttttaatctacttttgggaagatgattgtaagatattctgtacccacttagggatctcctgcccttcggatacacatgccttaactaccatcttgctagaatagaaggtcctgtgtttaggcatcaaagaaaggaattgcactgagaaattttagtgataattcttttattgtaatcgtgattttcttcctcctgctaatctttttaagtggtattaaaggaagcttcttgccaggcagtaatattcctccatgagcacacgatctttttccttatttggcactggaatttcatcaggctgtattagtctgagcgaaacatactctaggaataccttttttttttttttttgagacagagtcttactctgtcacccaggctggagtgcagtggcgccatctcagctcactgcaacctccgccacccgggttcaagtgattttcctgcctcagcctcctgaggagctaggacaacaggcgtacgccaccatgcccagctaatttttgtatttttagtagagacaggatttcaccatgttggccaggctggtctctaactcctgacctgaggtaatcacctgcctcagcctcccaaagtgctaggattacaggtgtgagccaccgcacccagccaggaatatctttagaatagttctatagttaggaacgttgagaccaggtaacaagggatttattcaatgggatgacaatttttatacaccatgcctgaagcaaataaaggtgatcagtatttatattgcagtattcaaatactctggagccaaatagataggactaccttaaaaatgttcttgtacatgtgggtttgatcttaaagatattagggatggtaacataccattctatgtatatacatgaccaggccttaggttacttaagggtgatggaatgaccattgtgtgtgtcttgtgtcttggtggccttcagtgaattctgcatgagctctagtagtaactgccactgctgtagtatcatggaaaaaacactgaacttaaaatagttttcttacctgtaacaaaatggacaacaatctcacagagtttgtgtgagaattaaaggagaaaatacttgggaagaagtgctttgaaatctccattgcactctgcaaaagcaaggaaatgcgcttgtgatcagtatcatgttgacgtggagtgagttactccccagctgttcacgatatggtcgcccacaaagagcaagtaggtcacttcaccaaacagaattctgtatgtattacagaaactcccaggctgagtcaccaagtaaaatgaagggcagtgtgctctatttaaaatgttcatttcattttcgcattccattctttactaacagaatggtttcacttcatttccagtcactttcattttcaggttgtcaagcttcacttagtgtcagttgtgttcccacactcaaacatgtgccttgtcttccttgatcttctctctgaggatgtttctctgactaatgtgctgtggtcagaacaagagcattgccacatggtgcatttcctaggtaggcatgtctaaaatcattaagtggcctagctcagaacattctttgtgaccctttcccctccccacccagtgcctagtgactgatttatctgaatataaggctacttccacttttagttcaagggccttgctccctgcctgcaagaatctctctaatcacattgccctccctccacccgctttccccattgaaaccaatgtttggagaagatagaagaatgaaaagaacatctcaggtcctgtttttgtaccaccttcactattgtagcacctcttttgtgttgccaactgaatatggtatacatggctttaagggggaaaaaagaaaaataaaacataagaaagtaggagagctcctagctttcttaaatgaattaaaggccttaggccagagtgaattatattatagattgtagactagatatggtggggaaggttactcaacaacttggttgggaaataaattaatatataaaaccatcagatatcagagcatagttgtggaaagtcacctaaggaaagtcattgtctctaggccaaagactggcctagacgtaagtaatgcaccagtgtgtcagaaagggggttggtcgacatcagaagcacccagaggcaaacactggttgtgccctgtacccacagtaactgtccatagaaatgtgaatgttggtagtcttcaaagtttcagtgtcactggcaagtccttctttgttggaaattcaatttaacattcaagttctatagcaaatgcctcctattatgatgtcttgtgtttacagtttgcctctgtaagtagaaccctctaaagggaaaaatgctctggtcagattgttatggtctgtatgacagatacataactgttgtaaatcaacacattggcattctcgtttgctccaccagtttgttgtgaacttcgtcaggggaaggcatcatgcctaagtctattcaactctgggatactgacaaggtcaaatttctgtgcctgcaaggctgggactggacccaagctgtacagttcatacaatgaaatagtgccatttagtaaaaaagggagataatatggcacttggttggaagtttggctctagaatctgattgaactgggtttgaatactaggtcagccacttacatgctgtatgacctaagaccccgctctaaaaaggatattatctttacactgacctcagagggctgttttgagaattaaattagacaatccatgtaaaatacttgactcagagccttacatagagctgttagcagcagcaacaacagcagcaccagcagcaaggtaaataccaccatgtgtgtcctttgggtggtcagcagtttgctgaacaatttggactggtttagaaccctcctaactcactactggggactttccattggaaccacagcactgggtagtgacagaatttgccagtgtaatcacatcatttatgagaaatgatagcaatagggtttggtgtcatagtaatggaaaatggcactggacactatcctaattttgaagaaatggagtgaagaagaagacatgttccagaatgcacaggacattgatcttcagcaaatttttagagtggattactgaatgattacgtgtgagaaaaatgtgattattaggagtcaatatgagctcattgaaaacaaaacattcctatttctaacatccttaaagtctttcacagttcatcttattggttatggaaatgtcaagggatagatttttatttctgggaggagtttggctaagatttttatgatactcttgttgtcttgttgaggttaagtagattcatagctggttgaacaaatgtccactggcagttttgacctgatggatggactaatgtccatctggagaggggtcctcagggtaagcctcaggaacctgtctagtgatgctgttctatccaattttctcattaaaaatttctgacgaaagcacaaataatgtgcttttgcaacaagtgagataggattttttaaagatctgtgtaggttgatgggcggatttgctaataacaaccatatgtagcatttattgagtacttactgtgtgccaggcaaaatgctaaatgtgttgtatgacttctctcatttaatcctcacagtgaccctctgaggtgtatactagtaatattccattctatagatagatgtagaggcacagatatgctaagtcatttacccaagtcccacagccaataagaggcacagatggcagaggaccatttgtctatcaccaaagcccatgctcataactgtattatgctactagaaccagtgagtcagaattttacacagattaatgtaaagtcctaagctaaggttaacaaaatagtatgttaagtcttgaaggaggaagcttaggttgatagcaagtaataaggaaaagatttagggacattagttggtgggaaactcaatgtgattcaatactaacgtatacctacttttaaaaaagaacaactaataggagggtgcattattagaatatagcatcatggatcatggtggcagtagttcttctctaagagtccatgtccagagtactaggtcaggtctgtcattaagggggtccttgaccattataatcaggagaataagaggtctggatttacatcctaagaggaaaaacggtgaactaatgtcaggctggaaaagagaaaaaccaaagaggaatatgaagacaaccttcaaatattaacatagttacatgatgagaaagagtagatgccattggtgtctaagagagtaaaaaaatcacttctcattccctgttgagaaatggactctggcatcaggttgatggagaacaaaatgtcagctttattccagtaaaaccatattagagaatgtggcctgatctgtggctacaatcaggccttttatacccttccctagttaaacacactctcagagtcaggtaaggccctggacaactgttgtttgcaggaggagggcagttcctgtgtgaaggagaaggagaaagtgtgcatcctgaagccaggggtgcacctgacttctcgactgtgaatgagagaggaggaaacctagttcatatctgcacaaaaattctttttggtatccttgaagtgggctgaaacaaaaaagatcaaaatgttactctagcaggaggccactcatggaaaccttaggcaggggaattgtgttacccctggtacttaccaactttaacttcagtggggcaaccaagccaatggagcactcttatctctgaaatgtttggcctctgtacagaatgatgtgaaaaagaatcttctagcatggggaggtggaggggagggatgtctagattacttctacggcccccactccctaagattcttttgaaatcagttaagacacgcataaataaaaaaactccaagtaaagcatgtcagtattttaaaggcttatttgtttgagcaatgagagatgatcagtgttctaagtgctatggttcatcatgttctggaggtggctttgttccaactgtttgttcacgagtgttttgagttaaagggaattacagtctacaaatttatgcacatggcacttcacagaatagaagaggccaacttctggcctcttatacccacatgcaacaaatacagctcgtgtccttcccccaggactcaatttgtaagcctctttattgcattgtgctgtagtaaaaaattctcagttttgtgggcaacctgtgaaaccagccttcctttatttcaactttgttgttttgcctttatactgtgaattaaatgaatccttgggggttctaattatattatggaaaaaagaacttgatattctgagaagctgaagaacaatttgttttcctcagctaggtatttaggacttttaggatttagttaccattttcaaaaaacttgaagaagattaattatctccattgcctcaaatgacaaagatagtatgttcaattctctcctgagttatcatcataataaccctatattcttaatatggccttttatattttacaaagtttctcaatagggaatgagaagaaagtgattttttaatctcttagacaccaatggcgtctactctcccttatcatataactatcttaatatttgaaggttgttttcatcttcctcttcagtttttctcttttctcttttaccacaataatcatcacaaataatcctgtttggaaggtggagaagaggaagcaagacagatattattgtacccatttcagaaataaggagaatggaactcagagagtggtggtgggaacaattaacaaatgttttctgagcaccaatctgttccaactacctgcagtagtgcatttaatccttataatagttccgggagttaggtgctattatccccattttgagatgaggaaactgtggctcaaagtgttagttgcccaaggtcatgcagtattaagtagaagaaccaaaattagacccaggctttctggttctgaaatccatactcttaagcactaggttgttaccactggagaggttatgaacgtgcccaaaggcactggctgcctagtagctgaggcagggccagaacctgtctttagactgcttagcacatcttctagatcctgtagctgcttcactggttttcattaactttggggtttttcaatacaaaaagaggaaacaaatgaaagctgagccgaattttgcttttgtaacatagaggaacttactcagtaccaaggataatctgaggctcttatgggatttttttaagtgcccagtgttgtttcatattctgtttattcttcaccaccaccaccagtaaatgcaggtggttcttgtctcatagtgattcacatgtgggtttatgccaggtacacctattttactacttttggcatttataagggcaatatgtttctgaactaatttggggaaaataagttcttatattaattgtagcagaaaaacaaatgggaaagtcagtgaggttcaatgcaaagagctcagaccaacctttggcatcagcccaagcagagttggaaatcccagcttagtctcttcctaaaagagggactttaagtgagttactgaagctctctaaaaacctatttctttattttaaactggagataacacttgactcatgcgttgcgtttgttagagagaacaaatgaaaaaggtcgttaagggtttattggcagtgaactgtatggtaggtgctgtgcttgtgtttgcttcacttaatcctcatgacagccctaggagataggtattattatcacctcctgacagttaaggaaattgaatcttaaggacatgtgataactttcctaaagtgaactctaccttaatgtgttggaaaagagtgtagcaaatcaaatatatcattcagtttctccaaagccatgaaatgtctttaagtctccctgaaagatttcccaaataaggctgtcaaagtcttcttaaagaatcccatctaagttctattatcccagtggttcctttatctttttatttcttgccataaaattaaatctagaattacaaagaagtatttcaaagtatatataatattcctctgttttatggatttacatatcacctcctccatcagcagggattaggaggggtgtaaatacttggatagggctcttttccttggacttcctcacctccatcaacaggggtcaagaggagcctggacagtaatccctgtccgacccccctctcagcctaatcactactatttgcctcaaacaatcttatttcatgaggcctttgatcaatgttgagattagtcactgtaagaagcctgacttgtaggaaaccttttacctcccagactctaattcttctattccgtttctccccaagtcctgtgtcctctggaattcagaatctgtcattggcaagatctcctgtgttctcaaccccttctcagaacagtcctttcaccttcccactctaaactgaactgtggctgtcgcctaaggatgctgcctcccctgctgctctcctaagtggtggtagtgttatcttccccagtctcctatgacaaggcctggaggtgggctaggtgtcctctttcttgttccccactgctgctttcagaccattcttcatctcctcttttctaaatccagccctcctcccccttaaaatcttatgttatcagttatctatagacctctgtgagcttaatcctacgcaatgtaaaggcatatctttctggccaatcaatatggagtttatggcacttttataaagaaagtggataatggcctcctgatcaagaacataactgctattttcattagtcggtactctatgatgcgggtgcatggtccaggggaagtgggttcaggcccatcagactgactgagagttgagttctttacccactcagagtcaagaattgtggtatggggggaagcactgtgtgaagcatcctacaggggtctgttctgaacactgaaaatgtacagtccctgtcccagagtggcattctcaagatttttttcttgatgggacttgtgtggctatgggccaaattaaatttaatataagcctgactctcatagcctttgtagaggaatgaaaccagaagaatttggagcagagagtcgggcactcatagaatatttttctaaaacagaggaagtcatggaagactcagggtctagagtataaagtgtttgttacttaactttgaaaggacaactttgtataatttagcaaagccttcttgtttaagattagtctctaataagtaagagggccttgctggatttcttcataattctcagtagttaccagaagtcagaactattccttatctgtaagtaacaggtctttagattatagacctagtggggatataactttaatgttgtacagttaaatcaacttcacactatttacaagacatgtcatacaacactgaaaacaagaaattagagtatgtggaaactatgctactaaaattaagcagcataaggaaaattaatgtaagcctataagtcacagcttgacttctgtttcagcagctgacccagaggcaatgaagccaaaaacaattttaagacctgttctgttctgacttgtaaagattatttgatgttaaccccatacccttatcccctttccaagtgagtaccaggggttaggaaaaagatataatattgcctggctcatttctaatcaaactttaatgctggcttcagcaaggccagatgcctactttttgtaaatatcattggcagttggcagtacatttcattaacagtttttatggctatcagtagtatttttgatactctgaggatgagcactagagaaatatgtgcttgctgaaaagcctgctaatctctgtgtgataacttaattttgctattacctgaatgtaagtgctattgatgtggcattagcattgatttcatagctatttaataaagagacagaaacttcaaatgcataattatgacatcaatatatgaatctttctttagagatgaaaaacacatagttaaaaactgtgaaaaactgccctgcttatatcagaaaacttatacttctctgttgaaaaaataggcaactaaaatagtttacaatataatctaaaaggatgaattggtggaattttcagtataactggaaggtatgatgtgttagatagtggggagagtgtatatatattatcaagccacaatattacaacctgacactattagatataatagattatgcagccaaaaatgtggtcatggacagtgataggggagcagaatggttcggtaaagtaccaagtctggtgacaggacaatgggaaaatttctgcagcctgatggtctgggtagttggatataagtctgacagcagagatactttcatatttagggaaaacctgcaaaatactgaaaagattaataaagagaaagggaacttctaaatagctaaaactcccggcagagcagcatagctgacagagcaccataatcttgcgtatcagagcttctcaattcctttggaacaggagaatttgataatttttttctcccatgaggatgcactatgaaggaaaccgctaggaaattggaattattttaaagtgattattttaacattaacttggtagacttcatctattccatagcatttcttttcttttatcccattcaattgcatcctctctataggattaatgcactcttgaaagtgtcaccttctagccagtggccaactaacacaaaaccaattcactaaacaaaaacacaacaaaggaccctcagagagtccacttcactccctgctacctccactggagcaggtactggtatcctcggctgcaagacctgaagacagatcacatcacaggacgctttgcagacactcgccagtaccaacccagagcccaagagctccactagatggctaggcccagaagagccaaaacaatcactagagtttggctctcaggaagccgcattcctgagagcggagcaccacctaagggagcaccccgtgtcccaaagaatctgaacagcagcccttgaatcccagatcttacctctgacatcgtctacccaaatgagaaggaactagaaaaacaattctggtaatatgacaaaatgaggttctttaacacccccaaaagatcatactggctcaccagcaattgattcaaaccaaggtgaaatctctgaattgccagaataataactataataattcagaaagtgaattattaagctaatcaaggaggcaccagagaaaggtgaagtccaacttaaagaaatcaaaaacatgatacaggatatgaaaggaaaattcttcagtgaaataaatagcataaataaaaaactctcacaacatctggaaatcaaggacacacttagagaaatgaagtcccagcaatagaatcaaacaagcagaaaaaagaccttcagagctcaaagacaaggttttcaaattaacccaatccatcaaagtcaaagaaaaaagaatttttaaaactgaacaaagcctccaagaaatttggtactatgctaagcatccaaacctaagaataattggtgttcccaagaaagaagagaaatctgaaagtttagaaagcgtatttgaggggataattgaggattaagtgggtttcagatgcagagatggtttaacatatgtcagtcaataaatgtgatataccacataaacagaaataaaattaaaaatcacatgatcacctcaagagacacagaaaaagcatttgacaaaatccagcatccctttatgattaataccctcagcaaaatcggcatagaagggacacaccttaaggtaatataagccgtctatgacacacacacagccaacattatactgaacagggataagttgaaagcatccctcatgagaactggaataagacaaagatgcccactttcaccgcttctattcaacatagtactggaagtcctagccagagcagttagacaaataaatggcatccaagtcagtaaagaggaagttaaaccattgctatttgccaatgatatgatggtatacctagaaaacccaaaaagactcatccaaaaagctcttagaactgataaatgaattcagcaaagtttcaagacacaaaattaacatacacaaatcagtagctctgctatacaccaacagcagccaagctgagaatcaaatcaagaactcaaccccggccaggcatggtggctcacacctgtaatcccagcactttgggaggccgaggcaggcagatcacgaggtcaggagatcgagaccatcctggccaacgtggtgaaaccctgtctttactaaaaatacaaaaattagctgggcatggtggcgcacacctgtagtcccagttactcaggaggctgaggcaggagaatcacttgaacctgggaggcagaggtagtgagcagagatcacgccactgcactcaatatgtgaaaatgaccatactgccaaaagccctctgcaaattaaatgcaattcccattaaaataccaccaacattcttcacagaactagaaaaaacaatcctgaaattcacatggaaccaaaaaagagcctgtgagtcaaagcaatactaagcataaagaacaaatctggaggcatcacattacccaacttcaaactataagggcatagtcaccaagacagcatggtactggtataaaaatagacacatagaccaatgaaacagaatagagaacccagaaataaagacaaatacttacagccaaccgatctttgacaaagcaaacaaaaacataaagtgggaaaaggacaccctattcaacaaatggtgctgggataattggcaagccacatgtaggagaatgaaactggatcctcatctctaaccttatacaaaaatcaactgaagatggatcaaagacttaaagacctgaaaccataaagattctagaagataacatcagaaaaacccttctagacactggcttaggcaaagacttcatgaccaagaacccaaaagcaaatgcaacaaaaacaaagacaaatagatgggactcaattaaactaaaaagcttcttcacagcaaaagaaataatcaacagagttaacaaacaacccacagagtgggagaaaatctttacaaaatctatacatgtgacaaaggactaatatccagaatctaaaaagaactcaaacaaatcatcaagaaaaaacaaacaattccatcaaaaagtgggctaaggacatgaatagacaattctgaaaagaagatatacaaatggccaataagcatatggaaaaaatgctcaacaccactaattatcagggaaatgcaaatcaaaaccacgacgtgataccacctcactcctgcaagaatggccataatcaaaacataaaaaaataatagatgttggcatggatgcggtgaaaagggaacacttttacactgttggttggaatgtaaaatagtgcaaccactagggaaaacaatgtggagattccttaaagaactaaaagtagatctaccatttgatccagccatcccactactaggaaaagaagtcattatataaaaaagatacttgcacatgtgtgtttatggcagcacagtttgcaattgcaaaaatatggaaccagctaaaatgcccatcagtcaatgagtatacaaggaaatgtggtatatgtatataccatggagtactactcagccataaaaaggaatgaaataacggcattcacagcaacctcgatgaaattggagactattattctaagtgaagtaactcaggaatgtaaaaccaaatattgaatgttctcactcatatgtgggagctaagctaggaggacacaaaggcataagaatgatgcatgggactttggggacttgcgggaaaaggttggggtggcgagagataaaagagttcacattaggtacagtgtacactgcttgggtgatgggtgcaccaaaatttcagaaatcaccaccaaggaacttactcatgtaaccaaacacctctgttccccaaaaacctattgaaataaaaaaaataaattaataaattaatgtttgtgttattcaaatacccataggagaagtaatctccttgagactggagctccattttcttcacttttctatgcctggaaatacctcacaaaatgactacagagtagttacccaagaggtatttgttgactcgttatctcttacagaattttagataccatctatacttcttttcttactgtacattttccctgggtgagctctcatttattcctgcggatgcacacataccctgaccagtcacagatctctacctccagctcaggctcttctcctgagctccagccccacgtgtccaagtgtctgctgggaatctcctagatgttgtgggctaactccaactcagaatgcccatgtctgaactgttagtatttctttccagaatggccatttcttacacttcccctaccttggctaacaggaaaatcgttatctactcagttgcctaaatcacaattttgaggcgtagaaactttccctcgtcctttcctcccatttttaatcaaacatgtttacattcttctttttccttctggtttaggatctcctccaagacggtttctgtctcattacttattagccttgcctaggccaaggcttgatttaggatatgtatgtttttaatacatgtctaatgaatgggaattttttgtagcttttagattttctgttgagaaacacacataaacacatactcacaaacacgtgtgtgcctggaagcacatacatgtagtattcacccaagtcgtccaagttcactgagtcctgtccagacctttaattctctcagtttatttgtgagattgttgtgtggcacaagcttacaggcatgtgtaattgttaagggaatatggattgagaactctgccatgataactcatagctccttctgggtagttaagccttacatcccattctgccaaacccttctcagacattcaaccattttctttctcccttgttaacaaattttttaaaatattttttaaaaggaaagaaaagaaaatcctaccttatgaaatcatcttggccttgatgagaatcttggccttgatgagcttagattctcaattgactattttccattctgtcactaagatgtatttggaaaacaacaaataacccctgagccctgctattgtttctttatggtttatgtttcatgctgtgctgcttagccagcagggagggaggcttaactgacaaacccagtttttgtagctgtgctgatatcatccacaattcaaagccacagtgaaaaattacaaatcagcctcagccatgtttttttgttgttcttcttactgagaaacacacatgcacagacaaagaagttccatgtttgctgagtgggaccaagcaatcttggtgtagaatgaagaaaaaatggtgaaactatggagggtgaaattatttaaactgtaaaaagcaaatgactttgttttccggatcttttataccacctcctttgatgcagcctgcttcctgcatgaagcctgttttgtttgttacttgttttcttatcctgagattgcgctaaaattgcatgactctgttacaattcttggataacttttcaagaaccactttggaaaaattattgtacaatagtatctctctggaatccagttttattctctcccagtcacttactttgccaatggcccattagctgtgtaagtgatgtagctcttccttttttcactcatggattacttctgcttggcatatcttctttcaccttgagcagcagtcaaaattttacttatttcttaatattcaacttaaatatcacctttgtgaaaagcctttcgggttcatattattatgatctattcatatttattcagttctctagtaagtactgtatgcataagtaggcatctgataaatatttattaagttgatattaacatatggcttaagaaattgctaattttataatacagtagttttattttttatgcaaacaacaaaagacatcttaaaaagctattcttttttttttgagaaggagagtctcactgtgttgcccaggctggagtacagtggcgcagtcttggctcactgcaacctctacctcccaggctcaagcaattctctgcctcagcctcccgagtagctgggattacaggtgtccgctgccacgcccagctaatttcatatttttagtagagacggggtttcaccatcttgaccaggctggtcttgaactcctgatctcgtgatccacccacctcggcctcccaaagtgctgggattacagatgtgagccactgcgcccggcccaaaaagctattttctttttaagcctcaacaatacatattaaaaaatacaagagaaagaatgtttgttaagaaaaaaatttagacatacaagtgtgcaatttagagaaactttttttctaaaatattataaatttagaaaaattttgcaaacagaaaacactgtagggacaatatatgataagtaaattgtacttcagcaactcattgctttttagataccactgaattatttgcactaatggaggaacattgttataccaacctatttatatttgatccacattttaagattcctgttcagcttatttactttcttacttatgtcttatctggattcttattaacgttagttctcccttacttgcttggaggagaaatcattagaaacatgctgagaactgggagatggccacttcaagtttaaatttgctatgaagaagctaccaataaccttctttcagtctaaattaaggtggcctgtagttttacaacccaaagcatgattgtgggatgctaatttagggaactattctgcagaaaccatgacacaatcagcttgctggtccgtatttagaaccatacttggaaattgtgctcaggtctgcaatttgtaattcatgggtaggggttgaatctagaggtggctgagagttcagccacaaaggtgataaaaggattgggaaagaactatgaaggaatttaaagaaactgggattagcttggaaagagaggaagataaagagcaatttaatcgcaatctttatgtacatagagaagcttagcggaacacagtgaccagtgttttctgcctcacctgaggacaacacaagaggcttaaactgcaatatgagggatttgggataggcataaggaagtatctactaacaagcaaaattggagtagactactgagaaatatggtagaatttccatctctgaggactgaaaatgtatatattctattcctttcgagtgttttaaggtaaatcttgctcaaagatgttgacctgaacttgatggcttcctggaaatccattcattgtgtgacattactgtttttagaagcttcttcatagatggcagggaggagcaagtacaccaatcaagtcacgggcagtgtgatatggagaaaagggctccaggctgagaggcaagggaacttgattgctgtctctgatgtactgcaattagttgagtgttcttatacttgtcacttaactcctctgtgcttcggttttctaatctataaaatgagggagccaacctaaatggctcaaaaaggagtttaaaagtaagaaagcataatattcagtaaacataagctaaaaccctctcccgggccagccacggagcaagacttcttcacgtattatcttctagagcatctcatctgatatagtttgattgtgtccccacccaaatctcaccttgaattgtagctcccataattcccacgtgttgtgagagggacccggtgggaggtaattgaatcatggtggtgggtctttcctgtgctgttttcatgatagtaaataagtctcacaagatctgatggttttataaaggggagttcccctacataagctctcttgcctggtgccgtgtaagacgtaactttgctcctccttgccttctgccatgattgtgcagcttccccagccatgtggaactgcaggtccattaaaccctcgggtatgtctttattagcgcatgagaacatactaatacatcctccaacccattttacaggtgagcaaactgagggccagagagactaagtgacttgccagttttacatagctagtttcagttctgggtagaacccaaatctcctgactcctaggccaggactcatttattttactgagctaggtctttgataatcatgctttgatacagtctttgagaatccattctagtttttctttacttcgtttctttttttcttccagaaatgtttattatgccctactaaatgataggcactatgttaggtacagaatggaactctgatggactcttccaggattttaaattcaaaactcaagtgtttcagttagtgaaggaggcttctggatctttccaggcatgtagatgtctttaaagatgcaatcaggcctcctcgtcacaagtgtgtggccagagatggagaaacaaaagattgacataagtatcctccaaggtttggagtcacttctggctttgcctaagaaggcagtagggcactcttgcctttcttcaaatagtctcttccctttctctccctccaggccccagatatggatgcttagcatgacttaggcgaaacttttccaactcccacaactgcacccctgttctctccttggggtccaaggccagttattcagtttgaagactgcctgggtttaaatcctactttcccacataccaactgttgaccttagattagttacttaatgcattctgtgaaatggcagtaatactgatatccacctcagagggttgttataagaattaaataaaacaattccagtagagctgtgattcttactaaaaaagtaataagtgttagcactcaataagttttagcaatttatattaatatttccaatgtagcgataatactgtcctcctcagcaatggtcccttcagcccagttttgagaccaaacccctcccaggtctttttaaattgtgcttttttcttcagggtccgtcaactggggtatatttctgtttggagacagtgtacagacacttacatattcagattctatagtctgaccatcctaagttcaaatccctgctctaatgtataattggaggaaaccttcctgtaagtatgatgggcatgcctacataacggctttgaaatacatgtgctggccattcatgaatttaattttgttcctttagaaccatttaacagagcatattattatgccattaattattattagtagtaataataatgatagtcattatgtattaagggcctactctgtgttagcactgtgctaaatgttttgcatacattatatctaacttttacaataaccctctaaagtaagttgtttcatcccccttttatacctgaaaaaattgagactaaggaaggtaaataaattgtccaagattacaagctagtaagagacagagccagaatttagtctgaaaatcaggtttctgtagctccaaagcccaaagcccatgatcactataactccttccttaccatctgagatggtaaggacaaggcatcttacctctaggttgggagctaaagatcataatggtttcggccttactagtatgattagcttagtgaaaatatgattcacttagtgaaaatatttatcagcttaatgaaattttattagcttaatgaaactttcattagcttaatgaaaagattttctcttgctggcaaaataattcatgtactgcttaatcaatgttgaatcattattcttactagatttatacaacctatttcattgtctcgcctttaacacagtgtgaaaatttgctgaaaaactgagagatgtcatttttagaaaccaacatctttgatttttttttaaaagaacttagttctattcatcattttgggtccatacctaaaacagctcttgatgtgtaagacatgctttataaatttgtgttgaatgacatgaatgaatgagaattcagtctggttaaaaacagctttattttaaagcacttgatacagtgaaatgagctgtggacacacgtcaaataatctattctctagatttagcctggcattgacccgctgtgtgacttacgtcaagccactatttcttgactggccctcacatgcaatttatcctttgcaaaatgatgggatttaatctaaatgattgctaaggttccttccaggtctcagcttttgcagcttcctatagactgtgaacatgggaatacagtctgattttctcagtgactcatctgggaccctagaaactggcagattgggaaagaaaactaatattctctaaaactgaatttcttaacttacagattataaaactctactttttaccatgtctaaaaattcagtattcgtggaacagctgatattatcttttgctgatgggcaaaattaacaggcacctttgagacctagcttcatatctatgaaaattcattaagttgaaagttcatttgtaaacaagcttctctagacagctgagaagtgattgttctatcttgcattgtatatattttaatcttttgtattgacctgtagtcatctcactggtcaagctaacatgtttttgatagccaagagttggaaaacctggtcactattggcctaattgtactcttggaccacccatggaactcttggcaattagattttcttataaaactctttcctagagggccctttgtggataagatgagcctcacattgcattttagaatagtacgtgctaagaagcagtgcaagtaaaagtgtgacattatagaagatgcctctggcttactcatcttcattatgacaggaatttgccattgtcaatgtcttatatgttgtagaatgagaaagaaatgactctttggagtagatatctgcaataaaatctggattgatctacttacagtcagtttcagagtaggcagtctccagggcactgggagtaactagactctggtctccaggcctaggttcagctacattccctacaaggcctttggcgtgtacctgttcagttggtcagtcaccctgtttccaaacaaaggacatggccctgaaaactatacacaacagggcaagatcctggctctagtttgggattcgtcatgtctttttagttaggcaagccttcaatttaggggacaggatcagagctgtgtcatagatctcttatatctttgtgccctatcttgccctcaagactgcctcatctctttgattagttcctgatgctgtcatgggctaggccaccttcctcatttcctactaaaattttcactttaactaggttgaagcaactcatatcatttctagcatgtcactgaattctatccctgctcttcagaatcagttacactttttcaactaggtatccagcactgagaaggcacagaggagaccaggcctgtagccagttgagaggttacaaaaagcatcaaattgtaggacagtcttatacaggtgactttctcattcagtgtaatgtggattatataagttgaggctttttgattgcaagcaatataaattactttggctaactgaaaggaaaaaagagtaatttttgaaggtatagagagtgtgtcatagaattgaaggaaaagtagaacagattttcagagtaggacatctgtgggagtagaggaaacagaaactaatggtcacgtcaaggcaccaccactggaatgagttcactccagacattttctgttaaacatctttattgtttgactagtcattcagattcccagcagagaatctgactggctttgattataagcctacctcttagccagggaaggccctgtaccttagatgacagtcctaccagcactgcccataataaaggtcaggggtggttacccaaagccaagcacttttggtgttcctaccaaaaaaaggacattcaaaggcaacagatgtctactacaaaatctgttctatgggatctacagtgagggaatagattcagccttacagctaaagaaacggattgctatgcagagatttctgcttcttaggagttgccaaaaagacccttatccggcttaggagttcttggctgtgattttagtgttcttttgtttcccaagtatttttaaaatgtaaatcagtaactagcaagaggcatctttggtcattgtagttgcttggagtagaataaatttaaaaaattctttgatgtgagaaaaattactatcatcattatcacacatggaaggtcaacattagggccagtcattggagttaaactgtcagaagaacatcccagttactttctcacttttgagttgtgtagactgacaggatttgagtctttgagggctttgactagggtaactgacctcaaaacaaatagctagagggatatttctacttctatccgctgagggatttgtagcaagaagccatattgtggatggtatattttaataacaaaggggattttaaaaggaggatgacacattgatttggaatgttttctcaactgtatttacttattcttaaatattttccttcatgctttctttctcaagtggatgaccagctggttgccacctttttcttctctctttgcctctgttcctaatttctttcttatccttaaccactccactttccttcctccaatcttgttttctctctaaatctttcctccaaccttattgaatctctccccttctttttgttatctggtcatttgatctataatttcgattccttttcctgaaattccctcctttttccttttcccctaaaccatcattctagtcctccccacacccaagcttcttatctctttgctgttaatctccaatgtgtttattgacttgtgtgccaaaaggcaaaatccccagccccctcccaaccatgccagtgcattgaaaagcagcagctgtcattgctcaacaagttccttgtgatctacaaatcaatggataagaattctcacagtgaaggtttacatgtatatatttgtatgtatatatgagacatgtgaccatgtttaatgaatggagaaggacttggatcttttctagtagagaagagaagcagaaagctttgcctaaccctatttctttactaaggtaatgaaaaaattatacagggaaaataaatgatgttaatgagagaaacagggacaggagaccaataaacaatcatcaggcatgagaatatcttgctgaacttattattgatagtagacacaggaatgtaatataaatgcagtgatggaacagaaagcagactcaggaaagaaagagatgataataaatagtaataaaatccaagtgattcatatgctcaagtgaaagaaagaagaaagagggcagtgtacacaaagtaaaagggcaagaaaatggaagtagagtcatcactcgtagagataaatagttgggaaatatgagaagccttcctgacatcagtaaaatattacatgttaaacagcaaacaaaagacaacaacagtgtctgtagtacttttggaatataaaagttagataatactagagtagtatcttcaaaataagcaacttcagaaatcaagtccccagtaaagggaattggaagaatttgaatagatgaaataaggagcagtggcaagtgatacaaaccttaagcaggaaaagtgattttaaatggtactggcaggttaacaactggcaaaaagaaaaaaaaagaaaagaaaagcaagatggtgctatatcccccaggtgctgggaaaccaacctggcctaaaaaaggagcagacccacctaactttttgccaagcactgtgctaggtgcattgcatacacttttaatttaagcctcgctgtacataaaagtgaagccaaggtctgagaatgatatccattgggaggaaaaaacaggaaaattttctgagccagttccaaagtcataaggctcagggggaataactttgactttgtcaagtcagagtgaacagccagagtcagcagacataggatattgtcagaggtaaatcaccagcttggtctggtctgtcttattgcaaggtcagaggaccatagcaagccagccaaatgttttcaaccatggaaatcccctaactttccaactgctgcagtcccacagctctgagcttttactcacaggatggctcccttccagctttcaaatctctccaagttgattaatcattttcttgttctgactcattcaggcctctagaaaaatagctgtaggtactggaagggctatgtagatcaaggaggtcagataaattggcttgatgttggtctatagaaaaatctagaagatattgccaaaagcttttaagcataccgtcttcagatgctgggatgtgggctatatccacaggccattggctcattcatgtgtttgaagcagaatatttttgtgtgcattaggagacttgggtatgttcatttcttaatgtaatgttagatattgtaagctggttgtttagacagtagaatttcattgtgaccacttatttttatatctatttagatggagtacaggccagattataaccccctaacaagaacagcaacagtaaacacacagatagtgcttattattagttaagcatggtactaatattttccctaagaggccacattcacaggactgaaatgtcagttctggttgtctgagccaagggcatatatgctgattacattattttgtctggctaatacactttatcatgaagcttattttagaagaaatgttcatttttagatttctgtttgtatatttaggtcatactataaggtccattctcttgcttttataataatttagtcttctgctttattcattcaattcatgaacattcattaagtacctgagtatgctagtcattggagatgcagttgtaactaaggcatcaccccagacctgaagttttatgttgtgttttgtgcttagtgattggcataagtaaaatacttgaggaaacacagaagcagcagcaaatatttctgcaaaggagaagagaaaatatttgagttgaagcttcaagaatatatcaacattttccagtttgacaagggtgggaggagccccatcaatacagggaacagcatgtggaaatgcaaagaggtgtgaaagagcatagtatattcagggtgaaaaaatacattttttatgaattgtagtagaaaatgagccgaaataggttaagttgaggtaagattgtgatgggtcttacagcatactaaggcattatcctgtaagtaatagaagggcttatggaggttttaaagaaagagagtaacttcatttgatttcttttttcaggaagagaattctgatgatagtgtagggtggaaaaaaggggtaacaaaggaaccagtgggaaagctgctgtatagtctggaagtggtagcagtaagaggagaggtgaagggacagatttgagatgcatatcagaagtcaaatgagcagactactgtgactggttggatacaggggtgggtgtttgagtgggacctccagttaggaactcagatgtctggatgggtcatgctgccttcaacaagaaattcagaggaaaagcagccttggggaatgatgaggtcattttgtaacatgttgagtttaaattaaggcactaatgagaagagacattcaggtggagaagtccaatggacgacaatagtatgggtcaagaaagaaagctgagaagtatctgaattacaattatgcatcacttaatgataggaatgtgttctgagaaatgagttattaggtgatttcaacattatgcaaacatcatcgagtgcacttacaaaaacctagatggtatagcctgctatacaccttggctggatggtacagcctgttattcctgggcagcaaacctgtagagcatgttattgtactgaatactataggcaattggaacacaatggcaagtgtttgtgtatctaaacatagaaattaaacagtaaatatatggtataagagatcaaaaatggtatatctatgagggtacttaccatgaatggagcttgcaggactgaaagctgttctgggtgagtcagtgagtgcacggtaagtaaatgtaaaggcttaggatattactgtacactactgtagattttataaacactacacttaggctacactaaatttattttacaaattttcaacaataaattaagtgtaattactgtaactgtttgactttataaacttttaattatttttaactttttgactcttttgtagtaaaacttaaatcaagcacaagagaaaatgatatacaatcaagaggtaaacaggagatatatgaggctgctgctgctgttacatataatattgttttacagtaaaatatttttaatatgtagaaagagtacactgtaaaataatgataaaagtatagcagagtaaaaacaaaccactaacatagtcatttattatcattatcaagtattatgtgccgtacattattgtatgtgctgtgcttttatatgactaacaatacagtaggtttgtttacaccagcatcaccacaaccacgtgagtaatatcttgcactatatcattaggacagctacagtgtcactacatgataggaatttttcagctccattatattgttgaccacgtagcacataactgtacttgaagccaagacagccaattagatcaagcagaagaggagggggccaaggacagtagtgtattctgttttgctttttttcctcttaagagctgagatcttcggccgggcgcggtggctcacgcctgtaatcccagcactttgggaggccgaggcgggcggatcacgaggtcaggagatcgagaccatcccggctaaaacggtgaaaccccgtctctactaaaaatacaaaaaattagccgggcgtagtggcgggcgcctgtagtcccagctacttgggaggctgaggcaggagaatggcgtgaacccgggaggcggagcttgcagtgagccgagatcccgccactgcactccagcctgggcgacagagcgagactccgtctcaaaaaaaaaaaaaaaaaaaaaaaaaaaaagagctgagatcttacctgcgtgcatgtgttcattgtagcactattcacaatagcaaagataaggaatcaacctaaatgctcatcagtggtagactgggtaaagaaaatgtggtatatatacactgtagaatactacacaaccataaaaaaagaatgagatcatgtcctttgcagcaacatggatggagctggaagccattatcctaagtgaactaacacatgaacagaaaaccaagccatgtgttcttacttataagtgagagctaaacattgagctaaacatatagacacaaagaagggaataacagacaccagggcctacttgagggtggagggaggcaggagggtgatgatagaaaaacttcctatcagatactatgcttattacctgggtggcaaaataatctgtgcactaaactcccatgacaggccatttacctatataacaaactggtatatgtgcccctgaacctaaaataaaagtttaaaaattaattaattaaacaaataagagaagaggtcttgccatgttgcccaggctggagtgtagtggccatttgcaggtgcatttccgctactgatcagcataggagtttgatgtgctctgtttccaaactgggcaagttcaaccctccttaggcaacctggttgtcccctgctactgtaacgtcaccatattgatgtcaaatttagtgaggatacctgatcagcattgtgtcctatagcccagaactcctgggctcaagcaatcctcctgcctcagcctctctgggagctgggactataggtgccaccaccatgcctggtgagattgtgtatcaaggaatttattcatgctatatagagagttttaggagttcaccaacagggttttacaaccatgtttgttgtttttatggcagaacacactttggattctgttcttcttctacatatgactaacagactttttaatgaggtctgatgcctcaatcaaaggctagtaaaacactgaccccttctaggccattatctttgtgtctatttggggaggagttggggagttgttctctgaaacgcaaacatgtactcctgctcagctttccctggctgacctggattccaaatgactgttggctcctctatatagatttgcagacatccacacaaaggagtgtcatttgtatgcagccccttaactaattgtaacagtctgttccttaagtctctgagaaagcacacaaattgattccccagcacttgcctatttttgaggacacctgtatgacccttcatcaaaccagctgacacattctgcctgcctttattcacctgctatttcaattatgtgagcagtgatgtatctgtctcaaaaatctctgtcctgggaaatttcttcagaagagaattattggaaaaaaatttttttgctgtggagccaactcagggctttaaatcttttccagcctacagagcacctggattcaagtgtctattccctcctgactctggaagaatgagttacatcttgaattgaggatcataagcacattgagaaactatgagtttatttcttcctgctgttaactgaagcaatgaaaaataaacaaatctagatagcccagagccagttttaagtatcacaagatggggcctagcaatgtactagaacttaggagccttagtttcaaaatatttttaaaaactttattgaaacatagttcacataccatcaaatttacctatttaaaatgtccaattgagtaatttttgtgtattccctgagttgtgtaactattgtcattatcaagtttgagaacatttttactcccaaaagaaatcttgtacccattagcagtcactctgcatttcttctccttactccccatcccagccctaggcaaacactgctttctgtctctatggatttgagatttttttctgctttttagctattataaataatgctgctgtgaacatttacatgcagtgttttacatggacatgtgttttcatttctcttttttttttttttttttttttgagacggagtcttgctctgtcaccaggctggagtgcagtggtgcaatctcagctcactgcaacctctgcctcccggttcaagtgattcccctgcctcagcctcccaagtagctgggattacaggcatgcaccaccacgcccagctgatcttttgtattttagtagagatggtgtttcaccgtgttggccaagatggtctcgatctcctgactttgtgagccacccacctcggcctcccaaagtgcctcagcctccgaagcatttatcatatgaatatatctccgagtagaattgctgggttatatgttaactctgttttcttttaacattttgaggagctgccaaatcattttccaaagtgaccacaccattttacattcccaccatcaatatattgagggttctagtttctccacatccttgccaacactttttattgtcagtcttatagccatcctagtagttgtgaagtggtatttcatggtgattttgatcagaaacatttttcacaaaatagaattccttagtttagtttagttttgttttgttgtttttttgttttttaagatgaggtcttgctctgtcgccccagctggagtacagtggcacaatcatagctcactgcagccttgaacttctgggctcaagcagttctctcacctcagcctcccaagtagctagtactacaggtatgtaccactgtgcccagctaaattttaaaaaattttttgtagagacaaagatctcactgtgttgcccaggctgatctcaaattcctgccctcaagcaatcccccttccttggcctcccaaaatgctaggattacaggcatgagccactgtgcccaaccatatttattgctttttacaagaaaaagttattgataggttatgctaacccttactcatcactgtaacactcagcttggtctcaactcttaaaaccagaccatataatgtaatacaatgtatccctgcgttgtggtctgtggaacacctgcaattaattctatcagtttggggttgatgtgatactggttaacaattcagattcctgcattccaccagggatcagaatatctgaggttggagtgtgaccttgggcaagatgtgttgctcttcttagcctgtttctggatctatatcagagaactggtcatgatgatatctctgtccttttcagctgtgatgttctgtagcattctgtgaaccactatcaggagacactagttctacagaaatcttgggaccttaacaacaacaacaaaatgacaaatatttatcaaatagtcacagcatataatgcgctatactggttaccaagttcacatagataactaagctgtggcccttgtccttgtagaaatacagcctcctggggcccagataagacaactgttatctgaggaaaacgcctccactccctcctcacttccctcctgggcacctggggggatgtggttagacacctgtccttcctatggcatttctcctgcttattcgccccttctctgactccctttctcaaggtgtcaccaataccagcacagccactcttgatggtattgagtttaccaaacactgagaaatcctaagtgtgtcaagtcagcccaagaacacttacaaccctgctttctgcctgacatggaggtcacaactgctttctcatcacacgctgatcctccagagacggaagcagtcatcctgctccagcctcagcctctacttcccaaaaagctgtccttctccacagtcttttttttttttcttttttaaactgggcaccaggactccattctagtgcctgactttgatatgttttcttcaactcactgctctcttcttttgttcactgttctctgtcttcttccactcacctatctcatcagcccagccctgtggtactgccccagttctgagaccctggagttccctttataatctccaccagccaaaagaaccatatgaggcctctttacctagcagactcttgatataactatcagatattccaacaatctcatttcagatactttccattgtccctttaagtatacattgctgacaagagccctggtttttagttgagaaaatcaggccagtataactgtaatttaatatctaaattaaaaagtgaaaggtcttaggttggatgtgaaaaagctacattagtcacattgttttgggccacaactgttccttatttttacacagtctgtccatccagaaggccactgtctgtccatgagaacatccacgaaggcatcagagctgagagaccttctcactaaatgtgacactgacactgtccaggagccgcagcctcactctatcagcagctgaggtttttatagggtgcccctattaccctgggtgttgtatctaccattataaagactgccttggatctctagttttttttcatctcagaacagacctcattgtgtctatttggagccccagcccatgcctgttgtgtgtgtaataagtgcgatgacttagaacagcgcctttcactccaggagctggaaacctttaacaacctcaactccacttccttatacagccacttagggaaggacagacaataaacaggaacttctggggattgtctgttcaggaaaagcggagagaaaaagaagacatattttttacttacctaagatttcattagaggtgccttactaatcaattgccaggcagttaaaagtgataaaggatgattctttatctaacgaaagaaaagccaactgaagtttcagctggctcaggaacttgcttttcatggtgaattgctagtagagtaagataaagcgtccagagtacaaaatgcctcttgttttcatgtggcctgacatttgttcatatccctgcccttgtttacttctcaaagaaacaggttctattcccgtagtcgtcccaactcactcataggtaatgccagactcaaggacattagcccaaggaaatttgccttgatgtttttcttcctgaagaaatattggactgttttctatttcttcaagttatgctatcaaagaaagaaaaattatcttacgcttttgttgggtaagtagggaagaagctgagaaggaaaaggaaaggaactagcatatgctttgcctcatgtactaggctaggcactttacctacattatcttattaagctaaaataaaaccaaattcatgtgacaagtctgcaaagcaaagcaattctagtgagcttaccatctgtgcttgtttatcgtttgttagccagtagctgtttggatgttatcatagctttcaccccagatatctacctgggcctagtctatgactttttcttgtctttccctttaaaatgtggctctgggaggcggagaaacccaacgtgtgtattctttcctattggaagctgctatacgtggttggaacctagaatctaaaaacttcttctctttccttttttctcttctttcttcctttgttatgagaaaaacctgttctctttttaaattgtcaatcaggcgggcgtggtggctcacgcctgtaatcccagcacttcgggaggcctaagcaggtggatcacgaggtcaggagattgagaccatcctggctaacatggtggaacaccatctctactaaaaatacaaaaaattagctgggtatggtggcgggcgcctgtggtcccagctactcgggaggctgaggcaggagagtggcatgaacccaggaggccgagcttgcagtgagctgagatcgcgccactgcactccagctgggcgacagagtgagactccgtctcaaaatataaaaaaataaaaaaaaattgtcaatcatggtgtcatgataaaatatttcgcttcatcattttggctaagtctaattaacataggttccatttaaatttaaaattttttagttctcaggttttattttttttttaaatagttaaaaagtagtttctgcccatctccctgccctctccctgcaagcagtccagctcatgtatgttttgtctaccattcccaagaccatcaaatgattcccctgcccagtcatgtctcccttcatgaattctggtgccacactgagtttctgtcctactcctatctcttttgagctgtgcaaccttgggcctacactcagtttccccatctgaggatacttattgggttgttatgaggattaaatgattctggcagtgtctgccgggtctccagacttcccctgcttatgttgaccctgtatacagctgccagatcagtttgtctcagcctggctatacctcagctctgaagcttctctggtttctgccacctgtgccttgctatctgagccccttccaggctactccacactaccctttccagatctgtctctcactaatcttcggcataaacccttgtcctccagccagcctggactagtaggatttctgtaaagatgcatttgttttcttcactttagacttggctcagtccatcctgtttgcccagaatgaattcttttctcatcacacttcaaggtacgctccgtagctgtcctacccagggagtggttggaggtgactgccaacctctgaacccctagatagtctatacgtggaccgcacttatcacagattgcctggaaatagaagctactaacacatcttgtttccctgtgcaggttgtagaccccctgaaggtagaaagtctagtttttcttacatatcagtgcataataaaaatttgttgaaaaaataaagctccttttttcaccttttcatctcctcattttgaattcagtagtttcctctaacgttcaaacagaggaaggtagggtacatagcaatcaggactttgccttacttcatcatcatatacttttcaagtacctgctaagtgtttaaaactgtgctaattgctggggttaagaataatattatagccacaatttactgagcccttcctaggtgctaaacgccatgctaaataagtacttttcacacattatctcttttaatatttgtgacaaccacatgaggaagatattattattatcagtatattattatgtaagctctaggtcagagaagttagtagcttactcaagatcacccacctagttagtggtagagcctcttaattatgggatatgatctactcctggacatgatcttgggcatggaggccctagaaagcttaagctcaccctaaaggagctgatgctagaggctgtctgctgatcatactccccataggaggacagcaagtgcttccttgaaggaggctcttggcaccacattttaatgtatactatactactaataataccataagtagtgtgtgcatcatatattatttattactgttattaagatgtgctctccggaattaatttacatctaaaacctgggactatttaaaacagaaattttaaaggaaatcgatacccgttgccttcagattgctcattgctttgattcacatatgataattaatgatatttctctttttttctagctagggaaatattttcaagattattaaattttttaaacttgcgaaggttaaaaaataaagcattattcatatttttccctattgtaaacttttttatattatgcacacttttaggcagaaacaactttctgcatgttaatatttctaatagtttatctttttggttaagtcatccagcttctaagaattattgagtaacatcgctattaaattgtcatggttgatgttattttatattttccgagacctagaccttgctgatttttttgatccaggcttttccttccttagggaatttagtttccctttgttcacttatttatagctctgctgtgggtatggtttggagccttggtttttattgctttaattgcttggtagtaattgacacactgtacacattccaggccccatgttccctttacatatgaattcacactacttgatgactcaaataggctataatgaatcccctttatcctgggatatctttgagattctgggttaccgtgttgatctgtttcctttaaacatggttctggcagtgttgccctactggaaacaactgacctttcatttctgctggtatttcatcattatgggtgcatcccaatctaattatatgttgatttgtaatgaacagaggcttcctctcatttaattttctgttgactttatattccctctgtttggaaacctccaagattatggtatcagtttcaattttgttaaactgatgtcttttcgtgatgacctgcttccagtgtattacttttttattcagtgattctatcaaccagtgttatctgttaaaaaaacaaacaaaaacaaccactgatatgctggtgggctctatgctgtcatctaaaatgttatagaaagatctgtttgtattgttattgttgctgtgaattagtccaatggcctacctactatataagatatatttgaccttaggagtgaaaaaaaaaatcttaacgggaatcctcactgaagtctgatttgggtacaataagaattcatcaaaaacatagaagctgcatttcctaggaaatcgaggctttttcctgtatttgggagtggtaaagaatacgcccaagaacttggaacagataaagcattggcagacaaacaaaagatctgtagggcaggacttcctttttattctcctgagctctctttcccattgtttcagagaagatggagcaaacacccagacagaagctgcttcagtattgtcttctattgataggctgcttgtgttcagtgattcctctggcccatagtgtctgctggacagttggaggctttttgaagccattgtattgttagagaataattagagtgaatgaaacagtgggtaggggttaacaacaattctttgttgcaagcaattggtagtcttggcatcagtattggtaacaaggccaatctactggaaggaatcgaaacaaaagatggaaaagttgtggttggtttgtctgatccatccagcaaatccacccatgcatggccattgtgtcctgtgagctctctggaaatgcctttggtcacactgcattccaagccacggggtgggtaatctctgggtagtcttgtacatggatttcctagactttcccataacaaaaatggcaaggcacaggtgttgtcttggcaattaatcatacactttataaagaaaacaatgtcctaacatttgggtagatgaatggcatggtagaaaagccccatgatgtttcttttggaaggagggttaaagaatgccgtaacactaactagctcagatgtgtctattgataccaaggtgaaaacatctaggcaaaaccataatctatgtcctcattgtctcctccatctcctccagacctaccctgtcctcgtcctaggagtttatattgtgatctagaggaggcccagccagggtggggtctaacaaattggggtgggtataaatttagtacttcaaagatagtggctcttattggaaaactttataagctgaatgcctatttccccctcactaatttggggaactgcagctgctgctaaattctgagtcaaatagacttgcaactatggttgatcagatttgtgatgtattagtaacacatggaagtggtgccttatgtcggggccctgggttcctactggaaacccatcacttagatttgtatgatattggtatgatctgctagtgtgtgatgctttgttacatcctcttttcaagtcagctttccaccagagcttcccaagaacagagaggcctgcctcaaatatttggttcaaattatgcaacataagttaccttatatctcttttcctgttgcttatctaaaaggacagagactcagaggcagtttaaaagtggaggtgggcatatctccaaggcgatttatgactttagacgcatatccctaaaaggcgaattcctgctctcacaagttgaatagggctctaatcccacaatctgatttaggccaagaatgacttacatttgaaatcccaaaccaagactgttcaagattggtattaaagtcggagcaatgaggtggaggtagggttcacctccacattattctgagaatgggcctgaccctcatggatctgtgggtgtgaggagtggtggttgtcaggagccggggaaggtagtgcggggagtgaaggaggggagacagcagtgtgcttattttcagtttgtcagctgctctggaaaatggccaaaatgaatgagatacaacaagccttcagggctgctgtaagccaaggagagacaaggcccctccttttaaaaagctctgtggaatttagacttaaagttttatatgttattttgtttagggtaaatgtgaaatccctaaacactccccaggaaatgttagctcccaggaacacacagtgggccctaactccctggacagaagtacgtcttgagggagaaaaaagaattcagcaccattccatgaagcctcctggctctgtttggccatgggagaaagattgatgagaaccatgattagatctgtctctgtggcctccagcagattattggaaagccttgaaaaaaaaaaatctttttgacaaaaaaggatagaagttccagtagacaggggaaagaaaagggctaaatcttccaggccaaaatatgccagggtttgtacaaaccagggagatggagcaaagctgagcacttttatgagaagaggcactggcatcaatctaaaggagagagaatctgggacatttaagaaaagggggcttccatgtgggaagaagggcttgtgaacccagtgtggttgtgaattctgtaacggaagtcaccagctgggctttttctaggcaggagttatcttctttactggcaatcatgttccaagtttaatctctcctcagtgtgactttggtctcacgttcacatcatgaaaactccaggctgttttttgctatactcctgagtaatgttgacatttctaaggagagaggaaatctggataaatagagttcttttcttggcattgttaaaaatattactaaaaagagcaaagggtgttttcagagctaagtggaagtaaagtctttctttgcaattttgaaaggccaggtaggtggctgggtacgcactttcttgtagcctgtttgttttagcccgcagtggtttctgagcagctctaagttctgataaaggacacaaacacacccatgctacagtggccatctcacttaatgctgtcttttctatcctgtgactgaagagcaggggctcttgttcatgcccagtaagaagtaaaccctgaactaaacatcacacactgagaatctcttcataatctaggcacagataatctttaacactaaactactgtgaaattctaccagcattaagtactgtatattgccctgtgcttggataggctggctaactcgtaggaagagagcactgtatggtatccttttgctttattcaccagcattttgggggaacatttcttttacattttaaataaaacttcagcttgaaaaaaaaaatgtatgtaacttgtaggacatttctgaaaattacattatagctagtctatcacggattttgaattgtctttaaattttgctatcaaaagcagaacaacaacttgtcatcatagaactggaaggcatggttattttgtttacctcttactttttgcccatttggaaactgaaattgcttaaagttacatagctagttagtgcaggaacggaaatgaaaaactatttcctgatgcctggtttatcacaatggaaggctctgcccacaagaaggaaagttcagttcagattccctgtaattttaagaactttcatgaatatactaattttagtagaaacaactaaccaagatggcttatcattctcaacggaacataattttaaggagaaacacttggaataatctaattttaaactgtaatgctaattctttattagtctatttgggggattttttatatgttgcatgacatacttgcacattttcctatttaatacttcttttaatcctgaaagcacttatttaagaatgatcactagcactccaggacaagttaaatacagaaagccatatacatataaatggcagacataactgcaaaaagagaacaatatagtgagggaaatggtcttcagggtgctgcaaagcgctttatagttacaaaatgccttcatgtacatttctaattgatcctcaggacagtgttgtaaaaggaggaagaatgtgtgtgtaagtgtacagctgttttccagaacaccaaatcgaagctcagagatattgcacaactcaccagcacagcgaggaagctactgaattgggactcacactcagaccttcaccccaagcccatagctcattttattacttcataatgcgttagttgcagaagtaataatactttaaaaagcaatccacattttttctgtttactctttcctctcttcttcaggacagaaactgtactttccttgtccagttccagtttgtattattgtattcatggtatttaccttacctggagggaataggccttttaaatatcattaaaattgggtttttgaggttatgttcttttctccttcacatcctaaacttcagacctcatgctctttggccttccattcaattcaaatgagaagggctgttgtaattgttggcaatgcctccccaggctgccactgtatgtggaggatcttcatgtttggaaagaaaaaaaaaatgcagtttagtgaagttcatgattctacttttactcttctaacatagccttttttttttaatttatttgtttgtttttacatgtaacactaggtggcagaataactacaccacaaagcaccacatcctttgtttctcactactctggggagtgggtatctgaatagtgaggcataaaaccatctgtggctacatgagattggaccaaccaacaaggccaatattttcttgacagggaactggctgcagtgattctaaaacgtatgcttccaagatactgtctttaagatttccatctttcttttttccccagctcccctggattttaatttctctgccccattgcactctgctagcagagggcggacacagcctgcaggcagctgctttgaaatggcagattgggatggatgtgcccattggtgctggcaccctcgcctttgtgtggcagtgggtcatgaagggtctgggggtaaggcacctgagtccttgcccgaatggcaccaggccctctggcagaggggcagcagtggctgggctgagtcagttggaagatgctgccctcactaactcaggtttacagaacaggtgtttttaaagagcagtctgatcctggttcagctctgtcaccggtttggaaatactgccgtgcagtcggtgggtcattgcctctcagtttcttcctagcaatttgctggtgtctgctaccctggatgcctcacatgccacaggacacactaagctaaataaagcagagcaagttctgtctttcatgttgtgaagagtatgaacttgggctgcggaaatacttctttggatttttgctgaaaaagaaaagaatagcattaaaacaaaacaatacttaccaactagtaataatactctaagtataccctacattaagaaactcctgtaaaaccaagtctgaatgtataaaatcgatcaaacaaaaaggttgtattttaattacaaaagcgttctttgtaactggaaccacaatcggatttcattaaatagtgagcttctgatgtgaattgtaaatgttttaatctacaaaaaaaagtacttaaatcttgacttttcaggaacccacttgttatataaaacaaaaaccaactggactatagttttacacacatacttacatcacaccctcaccactttccgactgggaatcctagagtattttttagtgtttagctggaggtccaggtagtgtcctaattttgcacacacagccctggtgacatgaaagggcattgttgaaatgaccaagtgagtcatggtaatcagggcaatcctgtaggttagagatatgggggtcttgtttatttgtttgcctgctagagctgcaattctttcataaactacatgacttttgaaaatacctcaaacaacatatataaatcagaccaaggatattaatctcaggccaccgccatagtgaggctttgaagccaggggaaggtggtgagaccttcttgtttgttaaggaagaaatgtcataaaaattccaaagcaggactcaaatttccaggggagagggcctctttattgtttcctctaatagctgctttggcgctttagtgaataaatgtgttgcacaaagtaaccctagatgcatctgaactttagtctggcttggctcccacttttgtatttagcatccattctgaattatttatttaagatatttttgctgttgtttgtcactccttcttcctgtctccctaccagtccccctcattcgtcctgtctttattttcacacttctctaattaattgatatcttctgctcttagcactgcagcaaatgtgcctgcatttttatgtggatcttcactatgcaggctatgcttttaagtttctggaatagaatgatggtaaaaatgagtcatggcttgtttctatatttgtttctgagtcaagaagcttaattttcttactataatgcctgagatatcaagctatacagtttacttttaagggaaacaatcacaatttcatcaattcctttaagtagatgttttcaaatattatagaattctttggatttgtgtttccaaaatgaacaacacaatggtagtgctattattgttttaaggagaaaaagaagcatatccaaaataggtaaaatcttcccctaaatcccctgggaacaggcctatgggtgttgccctggcctgctcacagccccaggacaaccggcattaattcactgagggcctcatacctacatctcaatgactgcttaaaccagatacctgagggtctggggtctaacagaagaaaaaaggagagtagagctgagggttatggaacattcccaggaagggagagaatatcagaaaatgcaagactgccccagtgcagcagcagtgatgcagccagaggttaccagaagttctggcacctccaccttcatggacacaagctgtatatatcagtttaccatggttttcagtgtaaaaaagcaacttatgtccttcagtgtcagtttattgagctcttcagtgcagcctcataacttatattaattgggaggaaaatgcttccagagaaaggagagatgctggacaaaacaactttgtctttgactagttgtcaaggccctgctgtttggagtcattgacaagtccttgattcttgtatgacagatccaggggaaaaaaagaagtgattcatcttcttctgttgcacctttcaaggaggaattaaaaaaaaaaaagattttgcttatggacttaacatcactggcagcagtaagtgggctctgactctttgcaaggtataatttaccattgtgctcctccctcctgagtttatgcacctcgatgagccccggcccattaaaattccttcttaaaagcaggaggtgaaaagagccaagcgtgtgttttttttagaggagagtgtagctatacaaggaaagaggtcccagtcctttttctattttaaatgctggtaaacaacttgaaacctgttaaagcttttgaaggaatgtggaggagttgtccttttgactctaatgttggggaaaacaaaataaaggaaataattttaagaaaagagactttcccatgatgagctttagtctgaagcatcctgcaggtgtcacatctgttcctctaggtgtgcagattaatttcagttgcctccatgtctgctgggtccattatctttgctcggctgggtccaacatctttgctcatttctctactgaactttttccaactttcagtgctgtgcttttccatctcagcccttgtcaaagtatgaaataccatttgtttgatggtgagacagaatagtgttgtttaaagatgacatgctaatacagttatgtaaaaattctccattttgtaatgttacaggaaaaaaacaccagtgtccgttatgactgaacaaagttatcactcagccatgttatctcagtcatgcacatcaagattgacctgtctgccatttggggaagccttcataatttgtaaggtgcaggaaggaactagttttaattgagatttaagaggaatgtctttcacagccaatagcctttctttttgagtcccttatttctaaagggtcttttgcaacttgtacaaaagagcaagatccttcattcctcttttaatcctacagcctgcaggagttgagtatacctataaccaggcagctaaattttgaaacaaggtggtgaagtttaaaattacattttagctgtggaaatttgagctttagagaatgattacgttctgattgtcttggaaatattctctgtatagagactcaaatgtgggtcttccctattatttatcccaacctcttcagaaattatatgaatggaagagggagaaataagagccatctaaaattatgtaaatctagctgggatgtgtatttttgaattgacatttaaatatggtcctagcttatattctggagattcaatacactcctccaagccttactttattccctacttcttcaccacccttccgtccatcactcatacacacatgtatgtgcacacacatgtcttttgccaaacaatggagaaacatacatggtattttaatagggtcacacttatataaactgttttgcaacttgtttctttttgtataacaacattgcaggaaaaaatacactttattcttttttaacagctgcctattaagtcatactgaatatatacatacaaacccatttgttattgatggatatttaggtggcgtctaatttttcactatttcaagcaatgtttcactatttcaagcaatgttatatgttctttttttcttaaaaaaggaatgtagccaggtgtggtgactcactcctgtaatcctagcgctttgggaggccaaggcaggcagatcacctgaggtcaggagttcgagaccagcctagccaacatggcgaaaccccgactctactaaaagtacaaaaaaattagccaggcatggtggtgtgtgcctgtaatctcagctgctcaggaggctaaggcaggagaatcacttgaacctgggcggcggaggttgcagtgagccaagatcatgccattgcactctagcctgggcaacagagcaggactccgtcaaaaaaaaaaaaaaagaatgttcctcattgtaaatttggtcaaattctccattccaaaaggcagaaaaatataaagaagaaataaaaatcacttagtcataattgtctatccagagatacctttaatactgtagtatatttatttccagattttttcagtgtatttgtttattaacaaaattggtatcatgccatctgtagctttttttttcatgtaacattatacttaagatatttcctcacatccttcaacctttcttttggaaaaatttttctgtatgttgtgttttgtcttttgtgaatgtttgtttagttttctgttcttcgcgtttctattggaatgttaatgtgtgtttttgtattggcttatacagtaaggctattaaccttttgtctcatatttgtttcagttatttttcccagtttctcatttgccttttaattttgtttgtggaatcatttatatgcaaaagtcttacattttttgtataatcaaatatgtcagcatttttctttataatttcttttaagcaaaacacatttctttaaaacacataaaatggtagctaataagtgattttgaaaagtttccattattattactacagcttttaaatctgtatttatttatgctttacagtaacccccctgtggggtaggtaatgttatctccgtttcactgataggaagttgaggcacagagagtaatacagatagaagtgacataaatgagattcaaactcagggttgtggacagtactcttactcactaaatatattgctatatattttactgttataattggcctcaaatattatcctgctctgtcttaacaattactaaaaacgagaaaaatatgcatcatttattctagtttttcaaatagttttataattaactctattttgtctggatcttatcttgatgtgcagtgttaggtgaagctcatatttaatttttctatttgtcagtgtccccagtatattagtgcctctttaggaacttggaaaggacttgccttctctaagaagcctttgtgattagtgccacttcatgttacttgtttctgcaattgtttatttcttcagaattgttggtttctcagcagctttgatctgaatgattttgtggaatctcatgttgctcctagattaaaagatttattttaaaaaaagaggtgctgtctcttcaagtcgtttcattctttacataagaacagggtgggaggttcttgtcctagttagcatcagcccctctcccccaaccctccacagtcagcagatccatgaatttagatgagaggaaagccacatctccattttcactaacctttaactgaaattgattatttccttcaattttgattgtgggcaaaaaaccacagtagtattagctgttcctgggactttaaaccacagatcagatagttaatcttgcatttcagttgttccaggtacctttaaatattctttatacgcatcactactttgacaatattgtagttgatccaccactagattttgccattaatgcattaagaagcacattcattaatatttcaaatattcaaagctattttggaaactatatttctataaaattagttttctttgtaatcctatatgttttatttacttaaaagtgtatatattttatgcacttagaaacatttttctgagaagggcttataggtttcaccaaatcaccaaagggatccatgataaacactgtgaagagttcttgtctgtttgaatacaaggcataccattgggccttgtaaattacccactgggtactgagtaatcaagaggcaatttaggaggagctggaaaatagtccaatatattcctctctagtgctttgattctttcacttctggaataattctctttatagtcctaaagagaactgtgtattctctttttctccatctcctttgcctttcatcctccccttttcctctttttcacttagtattttctttctttcacatgctcccttttttttctttctttctcattctcttcttccttgactttgctctttttcccttttcttcctcttccttttcctctctccccactaaaaacattaatatcttacggagtttgtgtttcaactattttcagaaaactttttctctttgtggtctaagaaagagttcaaagacagagataaacaaaaagagttgacagaaagagttaataatatcaacaagaagttgaaagcaagatttgtcaaagataaacataaggtaattatctggaaatagttgaccttagaggtcacctgcctggtttgctggtctggcccctgggaaagcccttgtaccctggttctggttccatcattccaagtcctactttcataccttagttacctaattccttttataagacaatcattcacactaattttcaaagtcccacaaggagggacttgttttgagacaatgaggcaattagactgtattgttgagttacagtcatttctttgagattagttcgaaagtatatatattcatggacaaaagttatcacataattttctcacctaaagtggaacttttgatacctgtaataagttagtagtttctcaactgcccataccatgatctcacctatctgctgcaatgtaatagtcattgttcatggatgcctatttatacaatgtgtattgctacagagcttttccttcttaaagtaatttctatgtctgggatgatgccatttttctacactaaaaacattagctcgtcttacagctaatataagctgaaaattagaggtgcctgggggagggaaatgaggcagatggattgtttacatgagtgctatagtttcactttttatgcaccagtcaccttggaaaaattaatgccctgtaagtttgccaatcagattgctccagtcatctctaaacattccatttggtttattagaataataaatactgtgcaaaaaaagttcatctggatccaggatattatactgtggtcagtggaagaaatatgtgctgcaccttacctctgactagatttggtcaggtgacacagtgagcttgacaaagggatacagatttaccctatttgggtgttgaatctgaggactagtcactggagttacagcctttagaaatctttgtcacctgtccagggctggtgctggtggcctcttcactggccatttctgtcatgcacctgaccatttgatgtctgctgagtggtctattaagaaaggattaaaggatctctcttcatccttccaggtggattcgggtgtctgtagtcacccagaaaagacttactggaaagtccattaaaggtgtcatctaatttgatgacgatgactctgaattaatttcagttggggaagcttccatttttatgtctggcttttaggtccttccatgatatgtcccttcttgtctcatcagactcattccagtggatccccaggaacagctctactgctctcagcgaaagaggcctgaagtcacactgcttggttgatctgtcgtgacatcctaatattttctctcaaactgttttctttcgtcctgtgtaaactttgctttttctctgaggcctatcctagtgtatttccaaggccccaggttaaatcccacctccttcccgagcctttcctattgtcttactcacttcaccaatctctcttgcccctaaccttctacagttctgaaacccgatacaaaaagaaaaacttttggcacaggaagcgattgaatagaatcagataaatactaaagtcataaacataaaatctggatttattcatataagggatattaaagttaaagttaatatacataagtatatttcaagagcaaagctcatattttaacactttatttctggagtataggttccaggaaaaaggaataaaatctgtaatttttaaaaaggcaattacagaatgtcccctgcactaatcaaattaattgcagcattaaaacatggatggactttgaaaacatgctgagtgaaataaatcagacattgaaggataaatgttgtatgattccacttatatgggtatctggaataggcaaattcatagatacagaaagtagaatagaggtttccaggagcttggggaaggatgaatggggagctgttttttagtgagtacagaatttattgggaataagaaaacattttgagtagataatggtaatagttatgtaatgttatgaattaatttaatgtcactgaattatatactcataaatggttaaaattataagcattacgctacatattttaccacaattaaaaaagcaatggaacaaaaaattaaaaattaaaataaaattaattgcaccattatttgtaaagggaaaaaactccttcagtgtctaaaaatggaagaattaaactgtgacatgtgtagtatactatttatgctcaattgataatttaaaattaaatgattttgtatattaataagaatttttacataatgttaagcaattaaaaacaaaatataaaattattaaaatgtgtatatatggagcaagatgagaagggaacatgaaggagtgaaaagagtttttgctaagattgcgggattgagaaattctttaattgaaagatttctctcttaacagtattataaaactccaaagtttattatataaatatgttaggtttcatagtgttgttctctgtgattgtttttgacatcttaactcaattgtaaacttcatagaagtggagtccatgtcatttatttcttccataacccatgcttttaaaatggtagagaaccacaatagattattaatgtttttaattaatggatagatttattagttatggagaaagtaagtcaaactagagcataggaactgacattttttgaacgcttactaagtgccacacattatgctggatgtttagtatagtttttttaatttgaatattcataaaaccctgagagaaatgtattactaatcaccttctaatgatgaggtatctgagattcagaaacataagtgagctgtgtgagtgatatgattagtcaaatttgagaccaggtgagtaatcccagcactttgggaggccaaggtgggaggatgacttgaggccaggagtttgagaccagcctgggcaatatagtgagaccctgtcaccacgaacagtaaaacattagccaggcgtggtggtgttcacttatagtcccagctactcaagaggctgaggcgggaggatcgcttgagcctgcaaggttgaggttgtagtgagccatgattgcacatgccagtgcactccagcctgggagaccctgtctctatacacacacaccacacacacacacacacacacacactctctctctctcacacacacacacacaatttgaaaccaagtttttattgtttttggttgatttttcttattccagaaacatatctctttaactagtaatatgttagtgtaaccgtggaacattgcgatggtttttgtgtcttaaaaaaacttaaagatgctgggttcatgactaataaaatggggtgtgtgtgtgtgcgtatgtaaggtatcaaacaatgaacactaatgaacactgcaccttttccaacattgccactcaaggacttcccacagactgcctgttatttgggggcaggtcatgaccatccccatgagatagtttactagagagcattattcttcctctctcacacattggtattaacttagacttttgtggtcttaaggaataaacacccactcaagccagctcagatgacaagaaagttactgcaaagaaagaagaatcttctagaatatcaagagcaggagccttcctgtgtaaaaattctggagcctctactgccggtggcctaagtagtcatttttcagaccagagtgacctgtccctagtcaaggttaactagactagaattaagcaactgagtcaagggcagaaactaaggggagaatttgccagtggcaggtgggcttgaaagaagctgctcagacatatttgtgagacatgtcagtgattgaggctctgcaaattcctgctgctgaagtccagcctccagtgccagcttccacaaagctctgccctgtcatggcccctgttcttgaacgaaatgcaaagcaagggaggatgatttaaaagctctcattgttcaattcccacctgtgagtgaggacacaggaaggggaacatcacacaccggggactgttgtggggtagggggaggggggagggatagcattaggagatatacctaatgctaaatgaggagttaatgggtgcagcataccaacatggcacatgtatacatatgtaacaaacctgcacgttgtgcacatgtaccctaaaacttaaagtataataataataaaataaaaataaataaacataaaaaaataaaagctcagagcacaaatagagtactcagaagtttttgctaggttatcatgtgtaatttaacaagatggcatttatcttttttttaagagactgaagaagaattagacaaggttagctgtgtaaagccagtggtaatctgccacatgtggttataaatggccataattttgtatgatcccaaagcaagatagatagcagattaagggtcagcacagatctgcaagttgagctcatggcactttatttccctccctagccccttttctagtgcttaggtagcaggcaccagttaagcatggtgtcttgaccatgatactgtggaccaagcagcgatatggctatggctatatcactgttttgcctgagagtcatttattccttcattatatatttattgggcatctactccgggccaggcatgtgttgggcattgagaaagtggtgaaaaagacagaggtcctgtcctcaaggagctttcattccagtggaagaattcagataatacacaaaataacaaatatataagatattttcgagtggtgatatatttgaccagggaaataaaactaaggaaagtgataatgggggggtgtggagactggctgctataaaatgggtgagcagaggaggcctctatgaggaggacttgcattagctgagacctaagtcatgagaagcatccccatgggtcttgggaaaagtgaggaaaacatattcaaatagaaagaaatatctggtgcaaaggctctgggataggagtaagcttagagtatcccagaacaaaaagagggccagtgtggctgagagaccgtgtgtgtgtgtgtgtgtgtgtgtgtgtgtgtgtgtgtgtgtgtgtggagaggggaagacagcgggggtagagatagtaggggagtaattacctcacaagtttcatggctgacacctctataacaaaggagattaacaagagaaaagcatagcacatttatttaaccaaagttttacatgatgcaggagccttcagaaattaagatccagacccaaggaaagctgtattattatggttaggtttgatgaagcatggacagtcatgtagaagtatagttggacaaaaagcagatatgacctaatgatgataaactagggggatcttagcaaagcctgtttgtttagtttcttcttggcctctgtgtttaacattccatccctccgggtatagtcaagacacctgtctcatgagggtcttcaagagagaaggtcagagagacctttttgcttctgcagttttcttaacttccttcagcttaatactcagtgcgccaagcttccatatttgggggtagcattttctgcactctatcatgctataagctgattttctcacatttagaggaacattcaacagctaacataaacaattacctgatgtcatatttgaagatatacttagataataaggtcttaaaaaacagtaagtacattaagtacattcacaacaattgttaatcttccattagttctgaaatgcctaatctaacctttgttttatctcagacttgggctagaatgctccttttaattcattctgcatgatttcatagaatcaattttttcttaaggtctcatatccttcaaagactttagggcaattggtcacgaagacccttgcacctcctcaaggctgtgtgctgtggatgttgcagcttaaggaagcattttgaaattgggcatctttcacagcctagtgtagaagttattggcccgcagtttttaccggctttctctttcagaaatcttcttttgttcctgccacaaggcaaaaacaggaaaagagatctgtgtgaaagaatgctctcccttttccttttgtggtgattgtgtatcttaagagaaggcctcaaaggttcccggagctgtctgtcttttcatgtaaatggagcccttaagcctatttagaagtgtgcgaaaagactgtgggagttgaggtgaaagatacagaagagtagcatcagcaccccgtttaatgtattcaagttcaactgtgcactctctctttcttgtatataattaaaaatactgcagaattgtattttgcacttgtacttttaattatatgctattcatattactatatacccatatagtgtgcagcgttgcaactacaaaaccatatattttgtattgggaggtttaagggattttccagggtaattttgaccgcgtaaaatttgccttacatgccaactctagaatacaatccccacgtaagatgtaaccctctatattaggtatttttaaatccctgcttatcccaaagtgagcagaactgggactcacattcaccccttgcccccaaaccagtaacaggtatagggttgtcactgaattttgtgagaagaaaagaggtgagacagaaggaacttgtgaggtttgacagaggagcaaggaaatctgtggcaggacacagtaggccggggacgctgggtcaggcagggaagggggctgagagagagttcctgggtgagactgtttgtactagtaaatgcagggctcaaagccatactagccatggggttggtagagtttgtaaataggagtaactcctactggatggataatagccatttttccctagagtaccttcaccttacaggaaagtttactgtgcattgttccatgtgaatgttgcagcatgtgtgtgtgtgcacacacgtgtatttgtgatgttgtagacagagtaggaggaaagagtagcagtgtggaaagaggagaaggcatgaggatttagcatccaaggtttaagaacaaggtctgccttttgttgttttgtggctggggcagtatcattaaatggctgaggggacctgagatattggcatgagagagggaaggtcacccttgtagcccctgtcacctgctaccttgggaggcattcccttcccctcttctcacccaccctaccactccaaggcagagtttgtttaatcagatgcagaaaatgttctgatttggtagtaaagaaaggtaaacaacacatccccatgccccacttaaggtttttaacaggtgcagttgaaatttatattcatggatgtgggattttcacctgccccctgacccagtttgtttaggaggttaatagaattccaagtcgcatctccctgggttggaattttctctacaactcttggtagtgatggggttcaggacacactaccccacaatatgaagcctggcatttgtgaaaattgcagaagcaggaaggtcattctcttactttccccctgcccttctctcctgaagctaaggagtgtccttatctctgaagacacacggactcagagaggagtttgaacaaacaggccttgctaaattccctcttgtttattgccattaaattatatcccctttttccaatcatacttctctacgactatccatctcttcatcaaacctaagtaaaaatacttaagtttacttgtttctttggatcttgatttctgaagcctcctgtgtcatataaaatttataaataaatttgtcatgcttttctcttggtaatgtggcttttattatagaggctcagccatgaaaaaataaatcgtttcctctcccacagtagctgttcgtcttttgagcaagtcttttagcctcagtttcctcctttgcatcagagatgatactgaccaccctgatgctctgtgagggctgaaaggaacaggatacctgcaagcattttcccacaacttatgcagatgacctgtgaacaaactgctaaccagcaagagtgtttgaatacaaaaaattctaatgcttaatacaacattttactcaagactctgttacatatgacaaaaactcagttctaagaagcttatgtaaaaagcagaatttcttgttttatagaagccagggaagacctgaggagtgaaaagggaaatcaccacatataagggatgaggcaggtgagtgctcccaggacagacagtcccaatgatgttagcaacatattggaacaaaaaattaaacaaggtcttagaacttaaatctgattttataataatattcattatcaatacttaattctaattttacatttttagatttatgtaattaacattagttacctatacagtaaagataaatatgtttcataatgctttttttctgacattagttcttgtttgaacacacaaagctacacttttctataagtaaaaatgaatatgtcagactttcaattcggaaacttgagtcaaatcagcagtctctgggaagaggaaagttgtaaggcctatgttctttcataatggcctagcccttccccctcatctgacattttcttgtggaaaacatctggtttaaataagcactaatggcaaacttgatcatcagaaactagaatgcagaaatcacaaacaatgtatagtaggttaaagggatgccaaaaagcagtatgcaaagagaagtcaacagcaaatttattttatatataaatttcaccattttggtgcttgtcttctaactgccttacacttttctcttctgggaacggccaaggcccccaaaacacaaaagtgaactatgatcccactttgctagactcttgagatggctctgtaaacataccctctaatctatggtccttccttcctacttcctcagaattcactgaaaacaatagagctctaggaactcctattgcttaaaacaggggtgaggatcgtgtttattcaggactatggctgttaaattagcaggactgttttgactagctggtactcaggggtagggttgtcatgttggtcaacatgcctatcccatttgggactactctaaaggaaataggaatgcctaaaaagtttctagacttctaagaattctatgactggggttagggatgacttataggcaggaacggagccagactcctgacggtatccaaggtttataggcttggtgatagaatttaccagagtagaagagaaagttttctgagtagctagtgttttgaatggcatggggtttgtgacaagatttggggtaagccagtgagagatgctttggagttatctgggacctcatttattctggtggaatgccagaagtacaggaggcatctcctagggtatttagttttttagaggctaggaaaggtagtaaaggtaaagtagatacaaatttgttactatgacttttatggagccttgagatagttatacgaagtaggaggttgagcagggattattttaatcggagaagagattagtagaaactcatttaggaggattagagcatgctgaatgagatgtcagaagcttttaggatccaagaaaagtggatggcagagagagagaggggtcagcactgtgtttaatttccttctttaccgtttctcgtctgcctttcctggatattacctatttcaaactaaagggaaatgtgtggaggctgcatcgggtagcagaaaaacatggaatagggaactctgcctctgaaatagcatataatacttcccacagggtttaatgtgaaataagtggtataatctaggtcaagtggcttaggtagaatactgatcaagtgaccagatgtcttggaatgagtaggataatcttagattttggcttcctatcctgtatccaattcactttaccattagggcttactattaccttgatgtctggagtgaatagacccttatcaacttacgataaacatttatcagtagttcagacagaattcttaaactggattcagaactagaattataatagcagagttactgtatgtttcaaacagtgatttggccttagtaaagtttggtctcttaagatttattactcatttatggctaagtatatcacaaataaatgttaggtcccctagtgagtattcagcaatcatttccttgggatctaaggcataccaggtgctatgttcaaaatgaatgggacatggttcttgtttttaagatgctcccagaccagtggggcagactggtataaaaataactaactgtcggccaggcgcggtggctcacacctgtaatcctagcactttgggaggctgaggcaggtggaacacctgaggtcaggagttcaagaccagcctggccaatatggtaaaaccccatttctactaataaaatacaaaaattagctgggcgtggtggcatgtgcctgtaatcccagctgctcgggaggctgaggcaggagaatcacttgaacccaggaggcggaggttgcaatgagctgagatcacataccactgcactcctgcctgggcaacagagtgagactctgtcttaaaaaataaaaaataaaaataacataactaactgtataatataataatatgataaatgctattctgttggtatgaatcaagtagcacagaggaagaaaacaattcactctagtagatggttggcattttgagagagatataaatataattgtgctcatttataacatgaattataaatgtagcagcattggaaatggacatttaataaggtgtagcactactaaattggattaagtgcatgcactgggtttatagatggatgttcccatcaaatttgttctttatttgtatccctacccctgagcagtccttgcctggcaagtgattggtgtttgcactgttgggggtaggctttaggttcctgtttgggcaccaggagctgtagggttagaagaagtaatgtctttttctcacctattgcaaggttcattactgaaccctatagcaaaggcagagtaacaagcaaaaagcataacaaatttatttaacagagttttatgtgacactgaagcccttagaaatgacccaaagacccagggaaaactgtgtatttatatggatagtcatacagaagtatgattggagcaccacagagtatcatctaatggtaatcaactagggagaactttgcaagccctgtttgttcgaatggcttccaagtatagggtaggacccctctggaatgaagatcttaaggcctacttttagggaagataggtcagaaaattattttatggcctgcttcagagggaaaggcaagagaaggtcagagagtgaccttcctgtttctgtggttttccaatgtcctttagcttaaaatgcttggtatgccagggtgccatatttgggggtatcctgttctaagccccaacatttccctggaagggcgatggctttttgatctaagcaaagttatcagagggaatgaggtacaaatcaatagaggacagactatgagatcaaattctgactctactacttaagagctgagtgtcttttgacaaattacatgtattcctggtgactctgatatctctataaaatagggatgatagtagtaccaaccttacaaggctgtgcctcaaatgtgtaataaatatgaaaacactttgtaaagtgctgtaaaaatatataaacattattgttttatcacaaatatcagcacaccaattatttatgtagttctatacattacgcaaaaagttacagagatgtggggctcatcttctaggaaaacagaatcagaattctgaatcagctctaaagtcggagaccaaacctcgagctctctctaggtgctgtttctcctgaaaagttgacttgtaagtctaacccagtgcattgcctctgatggcctggtgttcttcagataggtaaaaagcaactcgaaaaggggaagagtattgtgctttccgcaaagacgatacttttttgctctttggaaattcttgctcttttggttttgagctctgaaggtgaacaatccagctgattcaaatccccagagtagccctaataataggaaaaccgtgacaaccgcagatattaaaaacatacctcaatttgcacaactggggtaagacaaatacatatggtattatatgaaaaaaattcctttatgcaaatctagaaacttactttaatgtcatttcatttaacatcaaagagatgatgtcaaagagaacatgtttaccactgggagagtcaaatgaaagaattagtcttctagaattctttcaaatgaaagaatttgtgtgtaaggtttgattggttatttggcaaacactaatattaataaaaagaccagtacttctagatatgggccactttgtagagggattatgccagaactcccatagtatgtatagagacccttgaaggagggtcctcaaacccataagggaatttattttaaaaatattttgcttatgggcccataacttcattttatgtctctctagctcacaatagaggattataatctattgggctgatatatctgagttaacatcagattaatcgtatcactttgtgtatgaatatcatataaaaatgttagtggctgctgttttcaccatgctctgtcataattaaacaatttatttcatgctgaagcttccctgtcctgattctgggattgtcagttttatggttctcattttacacagataaaaccaaacttttcagatgtcaaataatgtgctgcagacttccatgcagttctcagctgcagttataaatcactgttgttttaagtaagtgacctaaatgccatttttattaggaatagagtggctaggagagactaacataaagcctctgatggagttctaacatttctccttgagcagcaggaagagaattgcatttcctgctggctagagaagccaggtcaattttgtcctaccattctgggaactatcacttcagacacctaacatatccaggtcctgcttatttttcttgaatgagctattaaaatgcatgtatgtgtgcacatacacacatacatacacatcatgcagccatttgcctctgtgtatacatacatatcattgtgtagattgcactttttcagaaaagacaactgatcaccagcacgtcactctcacttcctcccatgtacattttgtatcttccccacagggaagtgaaactggtggtgggttggaagagattgagtttgctgaagtggattctgccaagtggctgtttgtggatgacctttgtcttatagggggtaatagtgggagttacggattcctggcaaaatgtctgttcacatctcatcacaattagaatcataaactatgggctttgtggatttgttcacctgagatagtgatgaactaggaatcaaaagatctgggttttagctctatctctaaatatctacatatatgtgaagatagctgtgtataccactgtggatattttccctcttttgtcttatcttctccatgagactttcaaatcctcaaaggcacagagcatctttaatttacacagcattcactttttcatctttgtttgttcctagactgcatttagtagagatgtaataagtacttactgactgatagaatgagaccacatcctgccttagatgaactggaattccatttgaaagtgtttccaaccagaaatattctgctttggtgccactgctactgttcagattcaactatagcagccacagtgtgatcagacaccttctcccctcaggcgccacccttggccaccctgagaagatgggcccccctgccagcatgtctttggggcccagtgtttctgtctctctgcttctcccaacactcagtggcctgaagaagaagagctttggtatataatttcttttttccccccagccaagaggaattgagcactcatgaatattttaagcgtgttacaaagaacacaaaagctgtgccttcatgggaggattaaatgttggtgtttgactcctcacaatcagcacattttaaaacataaaccagatcatgtcagtctcctgcttcagagccaccagtggtctcccacactcttgcaaccaaacccaaggctgggtgccagcctccaaggcactgcctgactcagccctgcccactgctctgaccacctcttgcagtaattccagccatgctgatctactctgggttcccagggcatcgtaagcatctttctctttaggacctttctacacatctcccctgcctgggaccctgccctgaaccctgtgctaccgcaggatcgtcactcagatctcagcctgaatgtcctgtctcagacaggactcccctgactgtcctatcagtatctacacccgatattttatttcctcacatcactcatcatatctgaaattgcctgctcatttcctggttttcttgtttactgttggaccctgactagggggtctcactctacaagggcagaaagaggttgtcttagtctggttctctgttgttacccagaagctggaacaacgcctgttccccagcggttgctcagtaaacacatgtggactcaatgagggattgaattggaagttatttacctctctcctggcttttgcttccctctcttcctttgtctctcttttgcggaatctgtaccatgaaaagggctgttgtccagtagtggaacacaggccttggattgaggtcctggttgactcacttgatctgaagcttctggtcatgcacaactgccaattggaaacagctactatagaaccaccctctttttccaaagggtcaacaaggaaatcaaaaatagaaatacatttcaggtagtcatgtaatactttactaatactaaccctaagaataactttgcgataactttgcaaccttaacttccattagtctcactaggcagttctgcttcttcaattcctttagtttgttacatgccctgcgatccagcccaaaacaggagaagccctgtagaatatatgttgctatatcctcagatatggccaataaaatttgtttgtgacctgtaaggagcagatggttcactgaaggccattcatagaggaggcaaagcaccaaaattcagtgtctagccttaatttttccttattagagagtctggaatagagggatacattttcaggatctttcctaatagaggagttctttttttatttggatgaagagattatttctgtaatttcccacagtcttaggctgaactctccaagtaatgaacttttactcagaatagtctaggctttgtgtactcatggaaagtgtaatatagcttgccttgttggtttttctggagatagcacatttgggtcacaggggttcagccagtcttcggctgttatgcagtgtaattttatgggaatagttttataatgttaacatctgtagactgagagcttgatgaagacatcacccagattgcctgggaaacgccactgactttgggagctaattcttgataggtaaaatatttagctctctctctgtctcttttttttctttgcctagatacagctaccaaccttaccatttccatcttttatggcagatgagctatgtgtgtatttttttttatctccttgcagtatgcatttttgcaagttaggggataaagcccaggcccttggctttttaacttttctgcttccttgatatttgtacatgagataagatgttaaaggatttctctttacagatttctgttgaagagttatagaattgactgaatattcatatgtgtactgtcctctgcttcattaactctatgttcatatttctttttcccatgaagcctctgtcgcccattttgtttaaaattgcaacctattcccacaccttaagctaaatctcccttaccctagtttgtttcccatagtaatgatcactttctaacatactgtatcatttgtcatttattacgtttattgtctgcctcccaccactagaatgtaaactacagggaaggatttctatctgttttattcacattgtatcccaagtgcctacagcagtgcttggtgcatagtaaggctttgataaatatttattaaatgaatgcactgacatcctagtgaaaagacagatactgtagtgtagtgatgaaaagcttgggctttggagtaaaacaagcctgggtttgaatcccagctttgctgcttaccagctgtgtgtctttagaaagtgatttaacctctctgagactcatttttctcatctataaaatgaatattatagcaccttgaaagtgtgttgtgaagataaaaaaaaaagataaataggcaatacagcatggtaggtaagaaacaaggctttatcgtccaatggatatgggttctgggctttagcttccagttatggctctcccattaccttatacaatttttagaagccctctaagctcattttctttacctgtcaaatgggtataaaatactatggcctgcctcacaggagagtggccaggattaaaggaggtaatctctgcgtagtgcttagcagactgatcaactcgtaacaagggactaattaattgaagatgacgatgatgataatgtttgaaaggtgcttagctttattgctcacacatcatagtaattgctcaataaatggtggccttgacaataaatgaaggacaactttattagaactctgggagcctcccaaatttgccattttctttttgttctcctttctccagggggaagtaaggcaaatgcatgaagttatctttgtgagatacttgtttcaactcgaaaatgaaacagcaagcaatttttgtgtgccacactttttgccctgtcaccaacagttctgttatgatttcagaacttaatttctaatttttggatgcagttgcacagaggcatttcttcaccacgtgatcactgtgggggcttaatataactcaggcatttgctcagctggtttggagctaatggaattggctgtagtggctgtacttaggggagattataatgtctcaagggtttcattggcttccacttccttctgcagacttatagtaaaagacaagagatgcctcttcctggctctatttctcatttgctgtgtgactctcagcaagacacttcgctgccgctgagaaccacacccactaagtggacgacccagttatgaatccttgctccattctgctgtatgaccctgaccaaattattcaatgttgccatatcttattttccatctttgtaaataaataaatgtatatgacaaatagaatgatcctataccttagggctttgtgaagattaaatgagatactacatgtaaagagcactttggaagtactcaataatacttattattatgttttctgtataaaaaattgaaatgttctattaccatggtattttgtttataaacactttatatatatatatatatatatatatatatattttttttttttttttttttttttttttttttttttttgagatggagtctctctctgtcacccaggctatagtgcagtggcgtgatctcggctcactgcaggctctgcccccgggttcacaccattctcctgcctcagcctccccagtagctgggactacaggtgcccaccaccttgcctggctaattttttgtatttttagtagagatggggtttcaccgtgttagccaggatggtctcgatctcttgacctggtgatccgcctgcctcggcctcccaaagtgctgggattacaggcgtgagccactgcgcctggcccaacactttctatattttaaaagttctagaacttcggcttctgcccatgatgtcctgtggggtcctgaaagcaactgttgaagaatatctttgcttgaaaagagccacgagtgaccactgtgtcttcctacaagtggtcagacacaattgtctcttgattatttagtgtaatgtaggggaataactgagattaactggtggttatgattttgcttaaggcagtgtgatgaggacactaaggttagggcagctcctgagcaggaggaggctgctatccagagtcaggaagtctcccaaggtgttttttgcctggtgatcagcttttggccaaaagcctattactctcaggtgaacctggccctgttcttggtcccaaagctcccggaccaggctgagctataaaaatagaatgccaaattattgatcctacagtgtaaaattaagctgttctatccactggataggcttgcctaagttcccctttaaggcaaattaagtgacaaatcaaattattggacagttgcttggtaagtacagaattgatgtgaggggagttaagtgattcaaatgcttatattatcaggccccgttagcctgctgttccacctctacagtgcagatctatctgtcaggtgaccacttgagtgggcacacagggcttcctggcaaccctgattaggttcggaacaagcacttccatcatttttcttttttttcttagagatgtgctctcactctgtcatacagagctggagtatagtggtgcaattatagctcactgcagcctcgaactcctgggctcaagcgatcctctcccatcagcatcctgagtagttgggattacaggtgtgagcctccatgccaggctatactttatataaaattttttagctgacagacttcctccccatatcctgttctacatattattttttatttaaattctatttttcatcagagtaaaacatgtataatgttttacaaatctagtaatagtatagatttgtactgaaaaccagtttcttgccccaatttccccactctcctttgcttcttatgcttcgggagcagccactttcaaatctcttgttgattctactagtgacccccacatttctaactgatatgcttgaattgctgtttcttaatttttctattttagacattatctcatgttttctatggacgatgaccatagggtacttacaccattctctccttccatttcactcttccccttcttttttccggtatgattatatcataatattcagttaatatttacattactgtgacaatgtaagcattcatggcagagctacaaaatgtaccatgattacatttactttcttccttcctttcttgtttgcattttaaaatttatctctggaacacacatttctctacccacatctcctatctttaaatcgataagggcatatgaaaccataatgccttgcctttactacacctaacaaaattaacaattcattaatatcatccaatacccagcccaaaatcagatttccctgattgtctcaaagatatccttttacagttgattagtttaaataaggacctaaataaggtccataaattgcatttggttgttatatccttttactttcttttattctggagtacttcccagaataaaataataaatgtcacaaataatgtcacaaataattaataattatgtcagaaataattacttccttactctccttttatttgtgacattaattatttggagaaattggatatcaaatgccctatattctagatttggctgatggcttcttcaccacgtccttttaacttgttctgctagatcttatatttcccataaactggtggttgctgctaaggtttgattagattagggtttagagggttttgttttgttttttctttttaggcaaaaacactctataggtggtgctagtacttcctattttatcatgtcacaaggcaataatgtctgactatatcacctttaatggtgattaagttgatcagtggttcgggatagtggcagcctgatcttcttcccatgaccaagatttctgtcaacttttcacctactggttttagcacccattgatgatcattgcctagatccattgtttaatgagacatatattctgtcctttcattctgcagttctgtcctgtgccagtgagtgctgattattatgcagtttaactccagaaggccatcttattttcctcatttccaagtctgtgttagagtcagggagtttctctgtgaccctcatgtgctacctgagaactgactaaatttatatgaaagtaacattcttatagttgtattgattaaaatttttatttgaacctctagttgagctttgctgttggctttgaaaacataatggaaaagtggaaagcattcttgtcagtcatgttgaaaagtaactggcagaaaaagtggacttaaaaaaaaaaagtagtggaacaaataaggggactctgctttggtttataatgcctcctttctctagggtaggaaaattttgaagtccagtggggtctctcctgcctgcgagggaattggcgagaagctatcaggatacgcatggatgacacacagtcacacagtcatttgaggactttttggttgctgttttgttttagtttttacccccttagagaagtctttcataaaaatttttcctaaaccctgttgcatgcaaattagggcttttcctttcctctgtaatggggcctgatattctttgatgtgttgtagcagaatttagcttctaaatacagtttgaaactagctctccacacacacacacacacacacacacacacacacacacacacacacacccttgaattctcagctgacatgttatttctatttttttgtccttactgcaagaacctgtcctgtaggaaccaagttcagtggtaggaggagattatgtagacatcttgcttctacttcctgtaaagttggatcatgcagacatgagatgcaggtgaacaggagaaggaagtcctctccagtgtctcccagctgggagcctgttttcatgcttttcaaagagctccttttttgagacagatgaatccctggtataaatacctgtgctgttattatagaaagagacagattggtcaccttgttaatgacttccagtattccagagttcctcctctgaaatactctgcagatccaaattatcataatataggggcctcttctgccatttagaatgaccttccacataactctcaatgtccaaattgggcccttccttcaaggcccagatcaaatgactcctcccctgagtctcccattgagaagtcataccttcccatctcctagcttcccatccatcctcttttcatggattacttgctacatttcattttagctcatttgcgtactcattttactttttttttaaacagaaaaatatcagtcttatctttgttttaaccacgatttgtatttaataagtattttcataacatttttaattttaataattaattacttgagtaattttgttttctgagatattcagcttttatttcaactatgcttccagtatctacaggggagtctgtcagtcacatgttgagccaggttttctatttcagaagaggaaggaaaagaatgtgtaggggaattagtatggaactggagtgagaagaactagattcaaaacccgtccccaccacttcagagcaactgctttagtgcaattggtatgtcagcaggggccttccctcaaaaatacacagctctgtagcaaaagtcatctgtaagacatatttaagacttagttcatcagaaagagggtagggaagaaaggactgtgtagatttatgagcagtggtggatggcacagggatggggtcttgggccctcaaagccctccgaggtagtactggctactgggaaaaggatgtcggggagcaggtcccacttttagctgcacttgaaaagatgagtgtacaaagcttatggagtactcaggacggagagaacatggtgagtgttagggaaggaagccttaaatataaactttactctttaacctccttgcaatctcactctgaacctccttagtcccaggtatgggtttctctcacttcttacttccatagtcctctcttggaagctctttggctgaattaatgaaggggaccactactcataaaccataaccagcacttacgaggagcctcacattagtaatggacgacaaccctcagagacagccataggtcctaatgctattattaatagtcaaacctgtgtagagaaaaaggagaagccaagatccagttccacgggacataacaattcacaagcagctcatccttatttcagaaagccagtaagacctagctttctcatggaggttattctttcaccgtcagtctgcctctttttctgggaggtgccctccccttcaggatcaaggaatgtaaagaccatgagatatggagtcagacttgggtttaggcccatttatatgctgtaaactttaggcaagtcactttttctctctgatacggaaagagatataatatataccttattgatgttgataaagatgttcagatgaaattttatattcatataaatgtgtatattatatatatggcccgttcattattttaaagcaatgtaaataattcttatctattaccatagtatttcaaaggctacatcttgccacaggtgagaatcagaggtatgttctgggggttttttttgtttgtttttgagacagagtctcgctttgtcatccaggctggagtgtagtggcataatcttggctcactgcaacctccgtctcccaggttcaagcaattctctcatgtgcctcagcctaccaaatagctgggactataggcgcgtgccaccatgcctggctaatttttgtatttttggtagagacagggttttgccatgttggccaggctggtcttgaactcctggactaaaatgatctgcccgtcttggcctcccaaaatgttgggattacaggcgtgagccactgcgaccagccagaggcgtgctgtgttctattggctcttttgcctaccagtgccagaaatttcctacacttcttggcatcttgcttttctctcctatgaaataggcaatactagttgccctagagaagaaatttatctagagaaaaaaatgtacaaggtagacacagctggtgagttacccttatactatttccagtactaccaatttcatttcttccagaaggatttagaatgccacatagtagttttcctggtgccatgcttgaaatggtgaatctatttgaaagaagggattttgtagtcacattgatgttgctgcttgctgcaagccaggcaagtcacttaatatctttatccttaaaagaggaataatgtcacctacctcatggtgttacgatgaggatgaaaggaggtctgtaactaaggcactgaacatggtgtttgatactcactgggtacccagtaaatgttagttttctttgtctagactatgtagtgctcttcagttttcaccctgatcaaattgcatttgttaaaaattccaagtaagacatggcactgggtactttaaataaaggggtgctaagggaaggtcagcatgcggtagagggctgaaagagccagttacatttgtttgtttgtttgttttgttttgtaataaacaacagtggcttctcatctcctttccctggtcctgagcctgctgagtcactgttccagcccttgggccacatgatctcaggctgtgtctatggaatacagcaaaacccacaagaaaccagcactaatagatggcaggtcattttgagggatttttctttgcgttcctgtgcttgctctcctggtgagataggaaacctttaataagacttttcctaaatgatgttgcatgtgaaatgcagatttttttttttctgttctcctaacaaatgaccatttcatgaggtttcttttcattttttcttctttcctgcttctcagtacattccacaaagagcttattcctctgctggttactgattgatggttctactctgtatgccctttaattttgcaataaaccaacaaggagttgagaccacaaacttaaagagaattgacttatttgactggattcactggagccaacaggcagatttagtcatttcagtgtggtgctagggagggcaggaggagtccatgagaaggaacaccgtgttgtcaataaccagacagaaaaaagcttgcttgtcctctcattccaaagcatgtgggcatctgttctcggcagtgatgcctttccaggccttgatgaaggcaggacggcttccatgagatttgctcagaactccaggattctgaattcagtgggactttaggtatgtaggattggtagtcagtgtttccagcttctgtgtcccttttttcaaagggatcatggtataccttgaaggactgcaggaacagccataaaccctcctcagttaccagtcgttaaacagcctggcctcttggctagatgacttcaaagaccaaagacaaacccctggccctatcacctctatcctagctgagtctttaacataaggccaggacctctgtcaggttatagaggtactaatatacttcatgcgctggttcccaaatatattaagaattaattattttttttcttatttagcactaccattgtacagagcaacccatccgaaaaataaatacaaatatcatttcaaataggaaaaacaagaaaatatttcttaaactaaagacctttagttttagaggtatgcatttgaaaacacagatactatcatcacgtatatttaagactggttccagacccatgctgctctctgtgcgttgaaatgaaactgagaagacaaatgcccaaatggaatttttcccacctgtgaactcctattccagatcccagtgttgtttgtggctcttccacatttaaccagctaactgcctgctcttattctgttcttatgtgacaaccaatcttctgaaactctcgtcatcacatttcagcagaagtgaaaatattagcagagtggttggtggccaagacagaaatagaacccaggagtctgtgtcctttcccttgccggacctactggagcatggttcctcctgcctgaagactcagtgtttccaactctaacaaacagaattctaacagttgactggtttcttcttgctactcaaaatttgttttatacttaaacattttgtacagttttttctttatgaatgattttgcattaaacaaatgggacttggttaatctgatatcagtgaatgccttattctgaggaaattaatccacaaatatccgtgggaccatgagttttcatattgagaacctttttatgtgatagactagagagccaggtagaccaggtctgcgtctggtgctcccatgtgccagctatttgatctcaaaaaatacctcaacttcttgaacctcagtttcctcatctttacaaccaggatgataacgtttacctcactgagttgtgaggataaaataagccaacacaactcaagcaattggtaggggtctgacacataggaaatgcttagtgaacgtgagtttcctctcttcctccttcactcctttagaatagggttagagatgtagaaacacataaaatctcatgaaatgtgcaccatagagagagaaggataacacaaatgacataaaaagtcttgtactaagttacttggtattgattctaaagtcagggtattatctagggcaaggtggctcacacctgtaaacccagcactttgggaggccaaggcaggaggatcacttgacccttggagtttgagaccagcctgggctgggaacatagggaaactccgtctctacaaaaaataaaacattggccgggtgtggtggtgcatgcctctgttcccagctcctcttgtgtctgaggtgggaggaacgcttgagctcaggagttcaaggctgcagtgagccgtgattgcactactgcagtttagtctggatggcagagcaagagcctgtctcaaaaaaaaatgaaaaaaaaaatagaagaaaaagaagtaaagtatgagtattaagaagtgagagaaaagttagggctagaatagttagcaaagatatcatggaaaaggtaggatttgaactggcccctcaaagatggaaacttacagagtaaaggaggctatttcagactggggcatttggggtgggtaaaccatgagaaatagagaaattagaacgagaatgttataagccttggttttcctattggaataattgaacgcaatagaataataagtaaaaggataatattaatatgtgttaggcactgtcttaagtgctttatatgctaactcatttatccttaaataggtaagattgctatgccaattatacagttgaagaaagtgaggcacagagacattaactaatctacctgagtaggtgtggaataaataatctacaactagtaggcagtggagctgagctggaagcccaggggatctgactccagagtccaccctcctaacccaggacagctgcttcagtcacttcccagctcccctcactctgcattgaggatcagctaagaccattctgtgaacataccctgaaaagtataaagtaccatatacgtgtaaaatgacatggttattcttattaatgatgtcatatgagaggcgacaaatagctacctgaaaatgagggagaaaaactatggtctagcacccacatgcagttgtactgggcaggtttagccagtgcacagcatatatgcctcaccttcctctctagcgactcttgagtcctgaaagcctcacgtttcccatttggacagtgttccaggaggccatttccaagccagtatcagagactaaaaacctgtttggcatctggcagtagggcttgtgcctcaagtgtgatctgcctttggccaggacatccttttttttttttttttcttttgagatggagttttgctcttgttgcctaggctggagtgcaatggcgtgaccttagctcactgtaacctccacctcctgggttcaagcgattctcctgcctcagcctccccagtagctgggattacaggcacgcaccacaacgcctgactaattttttgtagttttagtagagacagggtttcaccatgttggccaggctggtcttgaactcctgatctcaggtggtccacctgcctcggcctcccaaaatgctgggattacaggcatgagccaccatgcccagcctcaggacatcctttttaacgggcttgtaccacatgattgggagtttgaatgttagtaaccatgatagaagatctccactccaagggcatcaccgtgggaggaagcctgcccctacttaccatgtaaatatttagccatttcaatatatttgttctggacttgttcttcttatgtgtgtctcctgtgttgagtctgtttaattgtaggttattattgtgtgtctatattgatgtcatttctttaagtacagacacagacagcattgcttcagctgcccccacccctccttttaaaaataacaccttacacaatatcccttccttgaggacatcaaataaataacttttgttcaagagcatatctgatgaggtggctaacttggaaatttgttcctaggcagaccttgtgacctctgtttcaatacatagtgagtggcctttgctcccattttatgctacagattcactctggagatagaattggttgcacctctccaggcagtgagtttggagagcccttggtggttaggatgccatttgtgctggtggcacagaaatacaagcagtaagcccagagttgcttactctccactggaggtttctcagaggctgggggggacccgagactcctctgcttcaactccgctctactatatgccactggaagtgtagctgaggctgaagggtatcaatgttggtatttatcaggttggactcccccaagtgccctattttcatacctccaaggagcaagtgattcaacagaactgttttcttggcctcaaatgagtctaagaaggggaaatcacttaataccagccgtctgtgagggaccgatcacaaagctgtgtctttctaatcctccttgtaaatcaaagggaggggaatccccagagcccaggagtacacatgaatagaaagcaccacaagtaataaaaacacctaaaaaggtcagcagaaactcggggagctgctggaaattcacctcctctgcctttctatgggactcagtgggcagtgatcaggtagcaggcaaggatacccaactacacaccaaagcaacttggccacaggacacgtacagtgcagcagaaggctggtaggatagtttcttccacatccatgtgaacctcagagtcatctgaccattggccttgttctcttccaggttctagctggccagagacttttttggcctcatactaactgcaaaattgcacacagttggcgaatacaccactggaagccactgtggctgcattgtcacagttcaccaattgtgcatgttatttcctgcagtgggcccaagatcactgacaggatgccgtcggggttgggctgaaggtggaaacagcacactagcttgctgtttgtggcctctttacaactgccggccccatctgagatccggaaccaacacgtgctaacctcagcccattggggccagtggggcagccggcagtggaaccatagctctccacacctatgtctatggcacggtagctgccggcccacagtttccactgcatccccttgcatgtgcaccccaagagaagtaggccaaagagaaagctgccttagggagccacatggttatcttgtgtgtttacttttgccaaatggcagacacaattctacttcaatgcatttttctgaactcagtggtcaaaagtagcacggaagcactacttgcgtcagccccctctgtgattgagcgagtgtgtgcttgtgcaaagctgaggagattttttttcacctcctccttctgcattccctcagactgagccactctcttctttaggggctcccctactaggcagagtgtttctctagctttgcctgtggatttcacagtgaaatctacagaagacagttttcctcagggctgataataagaggtatgaacttattaagattggaagcattctcaccataaacacaaattatttcaagttgctccttcatccccttttccttggccactgccattggttctgtgtaggatggatttcttaaggttgaagataagcaatgcaaaggtggaattttgagtacagcactcatcctaatgtgggtgaaatatatgaaacatttattctaagcagactgctacattaacagttgttatacattcattctctgcatatcttttgtggactcaacacttttaggtacagagaggttaggagaatttcccagaattgcacagcaggttagtgacagtgccagaaataaaagtctgcctgactcccacacccatgttttcttcaagccaaattgaagtttggcctcttctccacaaatatttcacaagaaaaattccccacagcctttcagaatttcccagaaaacaattgttgtgcagtccttcaagatggaaatggcaggctggaatattgaaaccttatcagcttttattctagaactgacagttgatattttctgagctgaagctaagataaaagtttatttttgtgttttttttttttaatcgtggaatgatttttgattttccagagcatggcaaaactaagccagcaaatactaaaaccacatttgtttttgtgacgctcaaactccgtaacaaatattgggtatctctatacaaagctggatgtggacaggaagggtttgggatggggagaggcatgcgtctgggagcgtggcctttctggacctaccctgttctcactctcttccttctgcctcttgccctcattgctttccttattctctttcttcctcttgtctccttctcacctccagctcctaccacagcagacaggttggggcagacaccgtcatggttggggagcaggaggacagcatggggaaaaccactccaggcctttctctcaaaccttagtgatgaaaggactcaatggacctgaacaatttctcacaggaaagttccggtctctgtctccttaaaagcaaggcattcagtaacccttaacagagccaggattaaaacttgaatttctgacttatcccaggcctctgtttggatagaaaggctaggtcactgtcatatatggcaattaggatcacttcagatacaaaagtaacatttttaaagctgtgccttaagcagagagaccatttttagtacaaaaaggaaaaaaagattaactgtgccttcagagctgatgaaaggcagagcctcgtcactttgaaagcattggatttagtgccaggcgggttggtgagtagactcagcacccacattctcttcttgcgtctctctctggccacccagattatccaggggctgctgtttacttgagagctagaagtatcaggacggactatcactgcacctcgccatcctggcccagttaaagtgattttgaaacttcctgatgtgtgttagattgtggcaggtttctgccagggagtgggcgggaggaggaagcaggtgtttttatgggctagaaatgcccctgagatgcctgaggttgcttcgtgaatcctctagcccagcctaccccttcaactctgttgcacagagacatgagttccatgaaaaatttagtttcaaaacttcccgtgggcgccggaaatgataaccacatgttatcaagagccactgaaaaccaccaaaaatttgtcaaaattcatataagattgcctcacatacttgactttcatagaagcggaagccattgacctacttgatttatggtatttattagcagagtctgaaaagacttttatcacaagattgatcttgttacagtgtagcatcttgaccatctttcagtgtatttctggatattagatttatttgtttattacttttataggtggaattctctagaccatgacattaaggcctggagaagtcacctgtcagtagatctgagctgagagtttctctctcttctcctgtgtcccatgttgccttaggaaggagagcaggcagggaagcctgcatgcccttatctcatctgtactattggtcttaggtgactccagttcacttggtggaaaatggggattacaaaatttgcctctcagctgcccccacagaaatctcagtgatggcgtttgtcagattcttgggtccttaaaaaatctgacttttaaatatcgaataattattttgctgatcatgaatatctcttctgctgaccaaacaggaccagatatcacattccaacctattctatccctggctgaccacaaactccctcttctttgtcccccaccaaaagtcaggtaaaatgagctgtttctatcaaaggctgtgtcttcaggcctggccatttcccactcaggtctccagggctatccaattttctcttcacctgtacattctagtactcatggaaggctccagtatacaaaatggctactcatggggccccctccccttccaccccaccaaagatatttctaaccttcaatgtagagtaagttagaattgacatatacattgtcccttaaaggccaggaacattaagcttgagcagagggtaggtgtagcctgggtatagtctagtcatagcctagctaaagaaagatgagtcagctgaaggcagagggtctgcattgggcacatagactggcagagagttgggctcagttggcttaatcctctgactaatgaccagttaattctgcttattctctcttaactcaaggtatttgctgccttaagctactttttaaatacttagtggaaataagtcatctattttcattagtgtgtgtgttgtgtgtgtgttggttggattttcctggccaggagcctctgccttctgaccaaaatgacattgatttcccagccttctgccttagcagttcatcccatctttaactggttcccctctatctcttttctctagcttatatgccttgctggctgtgaaaggaggacctactgggtggtctatgaatctataccccgtatttcttttttaaagatcttaatttttctccctatttttccttgtgggaaggcattaaaaatgggactcaaggtctatgtgacactatatgaggtgccatttcctatacaggtgcacctctgtaagcagcatacagttaagagggcaatgcaaagaagctttgggagtaagcattctctcatatataaagttgagttgagacagaagttactttatacaaatatagggtttcttgttccttctaataggtggatggtattcttcttcctcgagagaagctgattaagttggattctgtctattcctggcttcagacctaatcatgaccattaaaaatatctatcttttcctttgtccaagaatcccactctggtcttgcattgtaattggtggtgttgggggtgtgttgcgtgttttcaataagccttattttagggaaatagcaaaaatagcatatgtactttcaattaaattgttattgcttttgaacatattgacagcaaatacttgttatttgtcagtagtggcctatatgctgtataaaagggaatcaggcatgggttttatagctaaacaagcaaggtataaatcagcaaaggataactaatgacagtggtggggtaacattttccataggccgggtactgtgctaaggactacctgtgcgttatccagctgaatcctcagaaccatgtgagctaagtattatcatacccagagagactatgaagcttgctccatgtcacacagcgagtaaatggtagagcccaggatctaagttcagatctgattccaaagcccttgtcctaaacactgtgcaaattgctcttacacaaatttagtactgagcatcagaagactcagtctttcccatggagcaaagcagcaggaaaaccccatgaagcgtcagttagaaaccagactgtgttgagtctgtttataaattataatagtatttcatgtgttattttaagagtatagttttcaagtctcttgattgcctcagaggaaaatatacctatagtcttcttcccaagttgtgatgattgtaatcaatgctttgggaaatgttttcattctatcctttttgctgaaaacagatttagaaaaccacaacaattcagtaagatggcatgattagcaaagccctgagtttggttgctatgtatccctttggtgatttggctttaagacatgtaattaaaagggagaggattattagcaaaataagttaggagcttgttcttttgccattggggagtgaatattttcttccccatctactctttcaccagaagtggaaatgatgctgggtatcttttgaggtatatctgtagttcagttttaggttctgtaaggtagcatttcattagttctgtacaataaaaccgtcatctcagtacaggtttccattacagaaccagtgaagtgagaataaaactgaggaaaagtggtctaaatattttagtcagtgccttgtcattgaatttgtaagtttctggagcatacagtacctttatatcttgatttcccccatgtatatggtgacatgctttgcatggtaggtattaagtaagaatttttttctcattactattaaccatatcattggagtcccaatcattttcaccaagccatcatttaaaagaatcacaaaaatattagagctgacacatttagatctctcagaagttccacattttttttaactaagatagacaaatacattattcagtttattggtagataaagcacatagtattttcagagcaatgtcagtatcttattggccttgatttaaatgactatatttttcttactaagatttttacacaaattctttgcaattaaataaaacttaggaaggactaaaataggtagaaatgatcaggtaccaaagtatatcctgatatagaaaattgtgatttagtgttctattgttagaaccaactgcctggagcctatggcatatactaatttattaacctgtatatgctcattctgaaggaaataataacaataacaacaattgcttctatttattgaatatttactatgtgtcagatactttaagtatcttacattgattgtctcatttaattctcataaaaattctatgagatagatattattttacctatgaacaaatgaagctcaaaggtacacaggatcaaaattggaatttgaacccagttttactgaacttcaaagctcataccctatattataaaagagaaatggccgggcatggtggctcatgcctgtaatcccagcactctgggaggccgaggtgggtggatcattttaggtcaggagttctagaccagcctggccagcatggtgaaaccccatctctactaaaaatacaaaattagccgggcatggtggcacaagcctgtagtcccagctacttgggaagctgaggcaggagaaatgcttgaacctgggaggcagaggttgcagtgagctgagatcacgctattgcactccagactgggcaacagagtgagatcctgtctcaaaaaaaaaaaaaagagcaatgaacacagttccttatttatactcatagagctgaacagttatttcaaggaggctacttgaccatttccagccactttaattgaagacatatcttaggtgattctcaccagtctatggaaagtagcaatacgaaagaatatgagagataagattagcaaatactgagtggaatcctgcaatatctgattattgctgcagagtgactggagactcacaagcccagtgggcacacagaacttaaaagattgtctttgctactcgagtaattcatttctttacctgaccttgccgtcccggtccctctcagccctcaattaagctgccattgatataggatttataatgtgtcactggtccattcaggatacagtgacagaggtgtggctgaaaagctggataataaaaaatggaggcaacttccatttctgttcaaatcagggtagcaacaaaaccatagctgacccttgtttcagaccagcacagtccagctagacaaatattccaagcactgaattgtgcactaaatgcctagtgcccctttcagaagggacattgcctctgagtgaccaagatgctcatagtttcttcccacgatgagaacatctaaaccttggaaaatgattgtggtattcattatgttataattttccagaaaagaatctgtatttattcttcctctaggcttctaaacaataaggtaggttttacaaatgagaattttttaggaatagtttcttgactataccaaatttgaaaatttgtgtggcattcgaccacatgaattaggtagtattagagtcctttccagggatcttaaatgttatgaactttattttgtataagtaggattatgctcatttgtgtcttaaatacacagtgagactttggacttttttttgttagaattttatgttagaatttaactatttaaaagaggagtgttatttctttagagtcaaactcattcattcctatatcacaaatttggaaataaaactctgacttttaacgataacaagcaaagaagccacaggcatccaaattttattttatttatttatttttatttatttatttatttatttgagacagagtttctctcttgttgcccaggctggagtgcaatggcacgatctaagctcactgcaacctcggcctgccgggttcaagcaattctcctgtctcagcctcctgagtagctaggactacaggcgcctgctactatgcccggctaatttttggtatttttagtagagacagggtttctccacattggcaaggctggtctcaaactcctgacctctggcgattcgcccgcctcagcctcccaaagtgctgggattacaggcatgagccactgtgcctgtccccaaattttaaattattaattgtattcaacaccagtaatatcttaggttgtggttgcaattttattttattttgtttttaatttatttttatttatttatttatttttgagatggaatttcgctcttgttgtccaggctagagtgcaatggtgcaatctcggctcaccacaacctccgcctctcggattcaagcgattctcctgcctcagcctcccgagtagagtagctgggattacagacatgtgccaccatgcctgactaattttgtatttttagtagagactggccttctccatttggtcaggctggtctcaaactcctgaccttaggtgatccgcctgcctcagcctcccaaagtgctgggattacaggcatgagccactgtgcctggtggatataactttaaaaattaaagtctgataaaatgtgtacatgtgcatttaattgtggttagctgcctattatttaaccaatatgataacacccctcagtcccaacttactcagcatttagaatgaattgatagaggttttactctgaaaaaagtcagtctatttcctcagttttctgggttttgaataactgctaggccttgccagataattctggcctaaagataaagctggtgaaagtcagggctggggttttgctacctgtgtatttatcagtcttctcctaaaccatagtctgccttttgatagctctaataattaatttggtcttccctgtctttcttctcccttgccccctaccccttctccctgtctgttcacaggttatcttgacgaatcagattacaacccatctgagtggagccctggcttctcaggcagacctggtgtctccagctgatgatttgtccctgtctgaaggtaaggaatctgtcctggagaggctgaaacttgacactgacatagagccccactgcctctccacctcctgttgagagctgggagatatggctaataggccctggccagtgaacccagccggagcctgttgatttaggtttggccacctttcctggcatctgatctcttatattggggagtcttttgccctgcctctataagggagctccatttggaggccagtcactcctctgtgtgttatttcaagtccttagtatgagggctgatgaattgttaaatgactttgtttttgagactgatactcaaaggttggctttcccagtggtcccctagcaatttagccttttgcttgtgctgagttcttttggactaaaaagcgtacatcagtttcatgtgccagagatatgacattcctgatcagctttacagaagattaagaaaaaaatctccacgctggtaaatctgcaaaattttctccaccctcccctgctagcaaaggtcaggctggctatggtttcgatggcaataagctttacgtagctggggaaataacaccaataaaccagagggtggtttctagttttattgaaagtgcttacttgacatttctgagttgttatccttgtagtctagtatctttcatgcagaatgctgtgggtctgggtagacatgcatagctcttccaggcccctcctccctttccactttctgagaattgctcatgaaggaatacaggagacttttaggcctagcaaggctcctggatggctgcccaggtgatcttctgcagatcagctttgctttatggtcttagaaattgcaagaaccacacctctgcttcttagtggtggctttaggagggaaaactagtggctaatttatgaaaactgtacaatgctttgtgtacgctccttccaagttcagggatacatcatcataacccctatcagcgaggctgaaaacctgaatcatcgagcattcctccctcctgaaacttttgtcatcaagtctgcttagtacttctttccgcatgtatctttcctttgtcccctcttttttgtaatgtgtgttgtgatcagcagatttactaaactcccaattgaattattttaataacatccagattggccttcccagctctagcctctacagtttccattctgccactaccaaattgaacttccccgtctggccttgttctgctctgttgctctcctactcagaaatcttagaatagttttttttgtttgtttcttttttgttgtttgttttgtttttgtttttgttttttctgagaatgagctaaaatcagtaagctgattttaacatatttagggatttgggatttgttagcttgaaatcagccatggtgaaagtatttataccatggaaatcagcaaatgctgaaaatcaggtggcttgtttttttatttcctccctttgtgtagactggttttcaaaacaccactagataaagtgaatgatttcaacccttcataatctgtcatttcctttctattcaaatttagttcctgccgatatcttaggtgaagctcctatgccaagtgtgccactcttggcctgcccctccccactcccagctccaggcctgtgcagagacagctcacctagaacagtgcttccccctttcacttcttctgcttctcgtcccacatccactccttcgaggcttatttaaagactgcctctttcacagaacctgcttgcctatggtctcagtctctttttcctctgtggccgctctatctgctcaactgtataaagaaaaagtctagaaaattaatttaacttttcatgtttttctgcctgaattggcagattttaaagacacgaccatgtcatattctttttgtatccatgttgttatccagtgactagcaaagttctagacacatactaggcagtaaataaatgctgaatgaatatcacagtaaatacttcagaagaacagtgaccatgagaatcatataaagcacctatgaacattgttaaaaattgttataattattacacacacacatacacacatatacacacacacttaattcagctctgaggagaccagaatagagtaaactgcttccttatttgaaaatcagtaagtacttttatttgtgttgccttcctggtttatcttaagcaaagaagaagagcaaaacacatagaaaagaaattgcttcagggttgcagtataactgccacaagaaacccctgacttgtgttcatagcaaaggaagagttaccaggttatcctcccagaaatccaagaaagaatggaaataattgatttttctagatttttttttgtatagctgagcagataaagaggctatataaatatattcctatagtctataatgaaggtttttattagtggattaaaatgaacaatgtcttagaacatttatagccattcaaatatattacaatggatgttaagttcctgtgatttacacacacacagacatgcacacgcatgtataaattgctctgttttgcttcaagcattcattgtatcagctttgccattgtgttattaactgtggtgttaggcaggcccttttgatgactttgggtctcagtttcttctgttacatgacaggttggaagaatacaagattgctaaagtgttttccagctctagcatataagatcatgaggtaggtctgaaggtcaggagcattcacccactgatggggttttaattctgacttacagagtaggaagaatggccgtgttgctgatgttgccctagattaaacacaataaaaaggatctttaataaatcttagcactgatacttcggcatacctgcaggagcctttcctccctgtatgttttctctttgtcactctggggacacttctggtcttgtctgtctgtctcttgctctctctgcctctctccacacaaaggtgtacaaaatcagaagtgtgtgcaaaccagtgagaatgagaaacacactgggatggggtgactggtcaatttgcataagttccaaaagttccattctcccaatagtttgtgaatgggatagtttgtgaaaggcaggctgcaaattgacaagcacactgcaaatatgaggagatattttaagtaaatagagaaaattcagtttgccctctcattccttctcaaggcacaaagctcaggggcaggagcaatgccgggaaagtccttggcccttggggtgtacttctcccttctttggctctcccacctgggagctggataactcaacagtggaatgaaacctcaatgaagggaattataccatgatgtcaagcagtgaacatgagtctacttaatccaagccaacaactcagccacaaatttaataagggtggtggggcggggagacccagcaacacaaaaacaaagaactctcaactttacaaacactgggagggcaacagctggtcagccgagattaaaggagcgtgagagagcacctcccatctcctgacttctcctcccccatagacttccctgcagccagccagggctcgctttttacagccctgtgcagatgaccttgttccagctaagataggagctcttttgatctcagcagggggatgctctgggcctgcagctggcagatattaatagtacaggatctgttggggtggaagagatctctcggttgggccaggtcacttgtattccctcctctgcatcagagcagaagggacttcatttccctgagtcagcccctgctgcgtactactcctcttaggtcaactcagatcattttatcgctggctgctcttggctgcttgttctcacctcacaactgttttcaagggagcactgtttaagcagtgtactgtgcactgcagctgaaatctattacaggacagggtagaccttgccccccgcccccaaatcccagtgtgtgtctcatactcactggtttgcacacacttctgattttgtatacctttgtgtggagacaggcagagagagcaagagacaagatctgaagtgtacacagagtgagaaagagacagcaatacaggaaggggagactgttgcaggtatgccagagtaccaatgctaagatttctgaaggtcctttttgttgtgtttagggcaacatcaacaacacagtcatttttcccactctgtaaatcagaattaaaccctatcattgggtgaatgtttctgatcttcaggccctccttatgatcttaactgttagagctggaaaagactgtagcaatcttctagtatccactctgtcattcaacagaagagatagggacagaaataaggattttttctacattgttctagactaggtactttgagtcacagtattttcttcttcagatttcatttcattgacagaagttcagacatataggttattatagagttccctgctcagttattgtgactgttgtgtggccaaggacacatttcttagcccttgccaattcttccttatggtcattggagatactaagaactgttggacctcagtcataggtaacatctctttcccccagagtgattaatagagaagggatctaacagtccaaatggcctaagatgccatatcctattccaaagtcacctgggatttgagcagaaccagatgagtgcccacctacagttggtaggtgagatttgacaaatggtaacagtgagccctgtgcaagattgaagctatagaccattggcttgctttcttctgacgatttaacagagtagcagttacttcattatggtgacatggcccacttcaggagttccacatggctttatggaaaagaagacattattaggctgccatcttggtattcccagcatctggcatgttgtatcctgttttctgcattacttgttttccgatagaccatagcacatgaaaactaaaaatgtaaaatgtgtggataggtcaaggaaagaacacaagagaaatagcagcacttcctagaaccaagagtggtttctagttttattgttggaaggctttctattctggttggagtcaggggaattgatggctgatttcatgtgcaagagaaagtatttggggattcatattccctaccaaaccatccctgcgaaaagctggagtccatttgaaagattatatgcaagtttgtggcttgtgttctcttttaaaataagttcaacaagcaagacagctcagaatggttgggacaaatcagagactcatggttgtgaaagaagcaaacttcaaagcgcggtatgaattttcaagtcttatttccactcttgctttccagctggatctgctctggatttactgcaggatgtttgaaaatgtggctccctgctaatctcagacagttgctatgatcaatggtttctttcatttccgataaaaaacactggtgtttctacttaaattgtgtgtattttcagctttattattatagttatgatttattgtcctgcattacccaaatttgtaatccattaaccacagactttggggtgggttggtcaagttagcagaaatctctacatgctttagctccaaggcccttcacagcccagtctcagactaaatgttcattggtttgtgtagggccatgtaccaacgggtatgagtggagtagttttaaaaatccactccttgggggtatggtgcaagttggctgtaattagtactttgaaagcctaaggtgtcaccatgtgactacaaagttaatattaacaactatgatcaacattattaacattagcttttccatagtatttttaattgtcttaaaatgatgaatttcttaatctacctcaagcaactgaagcatgaaggagagaagagaattgctgaaaggccacacagtgagagctggtgtgctgggaacagaagtcagagcccctcccgtgaagttttaaatttggttactgctgcctcttaggagtgagttttggataaaaatgtttaagtgtcctggtgacctttcagtttttgtttccaaagccatagactatatcaacacacacgattttacatggttctattcacaagggcacacgccggccagtgctctacttccctggtattcaggagtccatagcacttgactgggcatatgtcttccagcagctgttcagatgccatgaaaggcctgatttatagaaaaagattaaaagcaccaaaaaatgtgtggtattcggctaaagaaagcttaaatattatgtgaggtaggggaggctagagttgagaggagatgggcacagcctgcaaatgtcagaaaagctgtaaatcccaaaagggagaggaatgtgttgaggattttcagcctggaggccagggggcaatgtaacctcagctgggagaacaaaaggagaaagggaacattaaagtcaaccaccaggaagtgcttcttggtcaggagctctgttttgctggtgctagtttgtcaaaaggaggcacatttgaagcacaagatgcattacaatcaagttagatgagagccagagaggtttctttggggagcagtccttgaggtagtttgtgtgggagttgggctagctttaaaagtagtttcccctcaccctcaaatctttttaccgtctagaatttactgtctaatttctcaaatctgcactgtttctgttaaggtctcaatgtcaagaaagctggagggacaaaaacaccaaggcatctttgtcagttgcctcagctagagaggtgacgacagggccaaaagccgagagaatgggatgccaagaggtggtgtgatcccagaggccttcaagttagaaggactctctgagaagagatccttgttttccatcactgcagagaatgctataccaagggcgagaggcctctaggtcagagatcataaagaagaaaagaatggctggattttaggggtggtgcccaacgattagtttgtgttgtaatgtggcatgaagcgtcttcagaatgcatttgcgatgtttactaggatttggaaaaggatcgtaacaaggtctagcaaggcagtctagcccaaggagggtccagttgaggtccgaactagtttctgatatctatcccttccaaaactgcatgtttaattaaagaacagccctcctctatcttccccagatagaggagggctgttcttcagtcgaagatatggagtggttgtgtttctctaccaaaacctttattccattttctcaaattttagcatacatcagaatcacctggggggcacattaatacacacattatggaccatatactgtatgcctggcatcgtatgtttattatctcatttagtcctcacaaccaccctctgaggatagtgcagttggccctccttatccatgagttctgcatccatagattcaaccaaccatgaatcaaaaaatagtaggggaaaaatggatgattgcatctgtactgaacacagacctttttccttgtcattattccctaaacagtacagtataacaactatctacatagcatttacactgtattaggtattataaataatctagagattatttaaagtatccaggaggatgtgtgtaggttacatgcaaatacagtgccattttatataaaggacttgagcatccatggattttggtgtctgcagggggccctggaattattcccctgcagatactgagggacaactgtattaattatcccattttgtagatgaaggaactggggcttagaaggctacacaattagtggcagagtcaggatttccacctagggagactggctccagaggtacatttttatccactaagctcttttgtaaggatacaattgagattatcatgactatgtataaataggaactaaaagacagccagatcacatgggtattgggaaggttgaaacttaggttattctcttcatttatctcatctctgtcttgcctttccatgacactgacacttgactttatgatctaattgacccattttatctttcacacctagtaattgtgttcatgggttgccttttcatccattcagccataacagtaaagaagatggccagtacacctatcctttcagcagggtccattgatggggggcattttcttataaggggctatatatgaaggacagattccttttgaagggaggtaaatacccaaacataacatctaatagaaggactttgtccagctgagcagatattataagtttgttaagtaggactgtgtagctctgttgacccctttagtcattttcattctcagcatcttctccttcttccatttattatttatttatttatttagagacagggtctcactccattgccctcactgtagccttggcctcccaggctccagtgatcctcccacctcagcctcccaagtagctggtactacaggcatgcaccaccatgcctggctaattttttcagttttgttttgtagagacagggtcttgctatcctgcccaggctggtctcaaactcctggcttcaagcaatcctcctgcctctacctcccaacatgctgggattacaggtgtaagccaccacgcccagcgctctcctttcaaataaaaattttgatagaagttacctatcactagtccatgccatcaagccaatatactgttttaaaaatgaaatgtaaaaatattttcttttagccccaggtaacctggctcctccttgatctaattttctttataccaataatcagcctttgaatttgtcttcaggaggggagagacgtctcttctgtttatccagaatccactcgctactctaaactattattatctggtgagatatgaggcctaaatttaaccatgtataagttacctcatattcagggacatataacagaggcacattagctagcgcaggctgtccccatggtcagccatgatctatccactgcttgagcaagggaagccagagaagacaagagggcagctggataactaaaatatgtgcagtggagaactctgtgtctgttagttacatccttttcatgatttacggtatacaagagcaaaattactctctaccctcaggggagtgtctgagttttgtgggttaaaagcaaatgtatatgtgtatatgtgcagtgtatgtgtgtgtgttgaaggtggaggttcccgtctttaatagaaggcctttttaggttatgatgttgattttttttaaccatacttccatctaataggctcatcaaagcagctaaggtaatcacatttcctggcactgtcatctccagctatagaggatgaaagaaatccagtggacaggtttaaggagacaaatttttttttgttttaaaatatgatgtttaggtaaatgaagctagaaaagcctcaaaataaattccttctgagtaggactctaggccagagatagaataagcaattgaaatctttcaatgtagaccccagaaaacaaacaacagtcgataagtggctgccagagaccaaggggtggatccaaggccagccaggaagaagtttcttcctccttcagggacaaaactagaactgagggaaacagctcttgccctttgactggatactacaaaactaaggtaaaccagcagaaagtcctgtcttagggtcattagaatgtgaggttttttttttgtttgtgtgtttttttttttttttttgagacatacttttactccatcgcccaggctggagtgcagtggcatgatctccactcactgcaacctccacctcccacactcaagcaattcccatgcctcagcctcctgagtagctgggattacaggcatgcaccaccacgcctggctaatttttttgtatttttagtggagatggggttttgccatgttagccaggctagtcaaactcctgacctcaagtgatccacctgccttggcctcccaaattggtgggattacaggagtgaaccactgcgcttggccagaatgtaagttcttgtgggcaggaatttttgtcacttttgttcagtgctggatctccacatcttagaaaagtgcttgacaataatagttaataaataattgatgataataaatactgtatgatgaatggcaataggcaattcagggaaccatgtgagaaaggaaagaacagaagtggaacagctcagcttttgaaggagaaatctcccaccttcacacaagggtggtgactgagtagcttagtgtgatacactataatgatatttattagccacctaccatctgctaggtcatgtgttagacaggtgcttgggacacatagacaaatgctacagtccctgctctatgggaagctcacaatcaggggaggggaagggctgtggctatgacggacaagtaagcaggttacatttggtgtcatgatggcattaggtttgggatgtttttggggaacagataggagtcctggcttggggatggaggctctctaggaactttacaacaaggaggcatgtgaagaattaacagcagttcttaataggagagagagaaggggaaagtgcacctggcagagggaaaagtccctgtcatggaatccaggcagggtgtagagccaggcaggggccggattgccgagaccagctcggttggggagaccctaacccagtggcgctagaggaattaaagactcacacagaaatatagaggtgtgaagtaggaaatcaggggtctcacagcctgcagagatgagagccccgaacagagatttatccacatatttattaacagcaagccagtcattagcattgtttctatagatattaaattaactaaaagtatcccttatgggaaacgaagggatgggccaaattaaaggaataggttgggctagttaactgcagcaggagcatatccttaacgcacagatcactcatgctattgtttgtggcttaagaatgcctttaagcagttttccaccctgggcaggccaggtgttcttgccctcattcccataaacccacaaccttccagcgtgggcattatggccatcatgaacatgtcacagtgctgcagagattttatttatggccagttttggggccagtttatggccagattttggggggcttgctcccaacagaaaggtcttattcctcatgctgatcagtttgaattttttcctgagggtaatagggagccattgaaatagggaagtataaagaaaatgtggcacatacacactgtggaataccatgcagccataaaaaaggatgagctcatgtcctttgcagggacatggatgaagctggaaaccatcattctcagcaaactaatccaagaacagaaaaccaaacaccgcatgttctcactcataagtgggagctgaacaatgagaacacatggacacggggagagaaacatcacacaccaggttgggggctaggggaggtatagcattaggagaaatacctaatgtagatgacaggttgacgggtgcagcaaaccaccatggcacatgtatacccatgcaacaaacctgcacgttctgcacatgtatcccagaatataaagtataataaaaaaaaaaaaaaaaagaaaagaaaaagaaatacggaagtgacggagtcattttgtagttggaagcattttctcaggcagccatttacaggttagggggatggagatgaaactatagaacttggattttgatctctttgaggcaagtcactttggggtggggttagccctaaacttcttaaagcaatgagaactttagaataagttttaacctttctgagatgttgggtggccaggtctggttctagcttcctaccttaccaacccaggagagatttctttggtataccagccttctgaataacatcaggcgagccctccatttatcaaggcgcctaacagttagaaatggtgtcaggctatctataactctgctaggatgtgagagaaaatagcaaatgacttaaagtactaaatggaactatgagggctctgtgtggtggctcatacctataatcccagcactttgggaggctgaggtgggcagatcacttgaggccaggagttcaagaccagcctggccaacatggcgaaacaccatctctatgaaaaatacaaaaattagctggatgtgatggtgcatgcctgtaatcccagctacccaggaggctgaggcacaagaatcacttgagcctgtgaggcagaggttgcagtgagcagagatggcgccactgcactccagcctgggcgagagagcaagactctgtctcaaaaaaaaaaaaaaggcactatggaaattaatacaagtgttatgttccttttgctaatgattgcaataataatattgagtgcctattatgcgtcaggcactatactaagcacataaaaatgcaacaacttagtggggttcaattatcaccctcaatttagaaacaaagaaactgaagtacgaagtatttccataacttgctgatgatcgcataactagtaattagttggcattcaaacctagagtcttgctctagagtctgtgctcttgaccagtataccatactcagctcttcaagatgatcatacaactacctcagctagagcttatgatcacatatttctgtcattgttagatttgagaggtttccatgcatcactataagtgcagctgtttctttatgtgtgccctgaaatctctatgctgatagtcagtagaaaagcagtgtgttttaacagaagctgaagcactgcatttagaattgggagacttgtattcaaggaccagctttgccacaaaccatctgtactattttgagcaaggcacttaacttccctggacctcagttccctcagctatacacataagagcttgcattaggtgaagctggcaggcctttcagtttgcttcttctgtcacattctgtcttcggtgagcaaattggtatgttcaagcctcagacaggcttctctgttcacctcttgaagaaggctggaccaacccatctatgagcattttgtcacatttcttttgtcactgttattatattggatatctagagcagcaatcttttgaatctataacccatcattttttagcatattgccccaaagtatggaaaattgctgccaaaaactatagtgctactatataaagttatataaaacacaccagaaatagaatttttaaaatatgaagtgggttctagtattttttccctacatcccgttgagtcattgtgatgtattcccaccacttggtatagttcaaatttctcccttccttgtttttactgcagaactctttactgtcccaagtagagtgagactgaaaccaaaatttgagcactgggtccattcattcaattgttcattcatttacacgttaagtatgaagcatctataatgtgaaatgcttgctgaattttcaggaggccataagaacggtatcaggcttggcctctcccctctcaaacataaaggctaattctagtgtttttcagttttatctggttggaaccctagaattcctgcatactgtaatgaagctaaactttacatctaaactggctatatgtattgcactacagtgcataagacaagaaaagttacaaaaagaaggaaaatccagaacgtgaggcccacagacatgaaacagttgaagtcacactgtagtacagcatctaatgaattgccaggatgagagaagcagatttttaatatcagaggcattcacagaaaggagagatcatcatgatctttgtgatggaggcttggaccactgccttaggatgtcagggcagaactaagatgggccccttggttggtctgtcctgactcactgtgtctgcagtgcctggatatcagccagcagaccacctccatcattgagttagacccacttacaaggtggcaggctattaaccagtcccctgttccactgagaacttgccaggctggccatcatagcatggtataggttgaagtagcttagtacctgtggtgggtgactgtttttctcggccagctgtttaatgagcaccaaatgaagtaaaatgctgcttggttcctctcctctcttcagacacaaacaatcgagcacatcctagtggaagggccgtgttggggaactggctttcttgtgctgatcatcttggttcccacatccgtccctcccctctgggctagagtttggaggagctattgaagaaccttgagaaaactgttaaccttgaaagtttagttattcatcatcaaatatattaacaaacgtttgtagccaaagctttactgtctatggcagttttaaataattatcaaaatcatgatttaattaatttctctctccattttgggttggcttagaggagtaggagattgcaattcacaagtactttctggtcctgtaaccaacttgcactttcaagttcaggtaatcaccttgtccttttcagtttatttacccatgacttaggttaaagttgcccatgcctctggtgaaattcacaaatgaaacttcacctagctgggtttcatatttgtaagaaatcattttttttctccatgagaatgtgcaggtcagctgagacaagcatgattaattctagacatgaattagaacaagcccaagctgaacagctctctcagaggaagtcatctgaaattggtatgtgtgacccagtatatcttttgagaatttgcattggaaaccacagtgagcatggaagaaatataaccttgatcctctgacctaataaacattcttgcaattctaaatgtacctagagtttgtgacaagtgtgtattggaaaactcgttgaaaacacatgagttagtaatgttctctttcagaagatgaacttgcatggccgaagtgagattccagtgggaaagacctggtagagaaagagtgggagaatgcgttgacctctggagggcagattatggcatgccaggcaatgggttgtgccatcagggaaggaatctagaaagacgaggagactcaggagaaaggagatgacttctgttgacaggtcattgttgctcagacttagtgcagatgagaaaggaaatccagaaacctacatgacagctcctcttggattggatgaaaatattgattttttttttttttcctagctggaatttgacagggtcagttcatgtctgggttttcagcacttaatacagggcgcttttgtcttgggaggcggctggactggtttttcctccaggcaggtgcacagagggcgtttattgtagcctgaaacacaaacaccaagcccctaggccctgatccacacactctccagtgtggctcaaggaaataaagtgaacaatgtctcttgcaacaggcgagcactgtaaatgccactcctgaatgatatatttcttaaaactttgtatccgtaacctgatcatctcttaaaacttaattatatgtcagagaaaaggaagctattggctcctccagctgtccaggttgaacgagagcacacaatggagcatatccgattcacagccttacttaggtaatcagattaatatctcctgaattgaatttacccttttgatatggagtctttcagctgccttgtttcacatctcaaattctgacaaagctgtgcggcctttgagtaatttccctgaaatctatatgtgggaagcctgtacttcaagcagtttttgggacttgcaccaattaaatctgtctctggcacacttttaatggcatgctttcccctgagtcaacaactgctccaaaatctgaagtcatttgtttaatttaaaagcaaaggttatggaacaaccatttcaagcttcaccagccaaactccagtggctttgaaaagggagatgaggcagaggaaaggctaataaactggatttcttatacacaaaataaattaattactgtgtttctgtaagctagtatcaaatcaagtttgttcacaccctccttgccaacctagctctccctttctcttcaaactcaccctctctgggctttcatattcacgattgaggctcaccctcttactgttgttcttgcaacacaaacatctggactggatttttgtcagctggagttgagagagaactgtaaatgatgcagtgatttttttttcgtccttattaaatttatttatagccagtctgaagccaggaaacatgctagagcctttgattggaggttctcgaggaatgtacggtggatggtattttctcctgttgttttctaaataatagcaaggatagaattacataactcccaacttgagtattttttgccctgaaggaccctttattaggacattttgcacatcagaattcttccattatatttgcttatccaatatgccttcttttctgtcagtgagagaaaaggaaatgtacatgacaggttatttctgaaaaattagaaagatggagagtgagtttctggttgtttgggacatgaaccagtggcatgagtattttcttttgccaaagggacacaacatggatcctatttctacctcttaacaacctctgcaatcttaaagctgccaaatctcaaagaatttcattcatttagtcattatttaagataataaaaggccctacaagcagcttacgaaaataatttataaaatatttttctctgcccttagaccttgttaaataacaatgccttggtgtttataaaattatttaagaaacaaaactttctagaggaggctgaatcagatgatgatttcttgaggtcccttcccagttctatgatttgagatgattctttaattttccttcactgtcatttatatctgtgtcattaaaaaaaaaaaaaaaaaaaaaagggctgtttgggaatgagatttgctacacccgtaggcattttcttcttcagaaaagagactgtttagctttctgccacccaagtcagtcatcctcagcctgaacaatggagcttaatgttctccatcttcctaagagttagtgtctgttgttatgaaagtgaattgaaaccaaatgtactttctattggaaaagctgcccttgctctcagctcatggacaaaactgagagagaaggctcttacaaaacagagggaaaaatcctcgctgtcatgtcataacaccagttatttcactgttagacctatgaacatatctttgatgcaacactacactatttgatgatgtttctgtgtcacttaagatgggcgtttcatatttatctcttagaaatgttagcagatttttttcacgagttatcttgcttatggactggaaaagctattcttacagtaagacccttcattaactgagaaggcataaaagatagctcatgttctccaccaagaaaggaagctctgtttctctctgtctgatgggaagcatttgagacagagcagcttcatgaagtgtggatgtctgttacccacttcccagtttttaaagtaaaagccaagtcaacggcactggtacttgtagtgaaatgagccacagaggcatcattactcatcaccatcacgactcaaggatcagcaaatgagagtcctgaaggtaaagaatgtttattttcaagtagagaagaaagaaaaatcacggagaggtagagaaaggtgaagggcaaaggaagaatccagcagacattaagcaacactgtatcttccaagatcataaagccaaatagttcctgctagatttaacttttattattttgggagatgaaaatcactggggcatggagttctcattctgcatttaggaacttccataatattttaataataacaataatgataataatgccaatcactttaattaaatctccctaaataagcatcttttaatgcagtgttgtttgctgtaaaacatcccaactaatggtagaggctggatgtctgccaaagacatggtgagggaaccgccacagagccgctggtattggaccctggcagagctggttcctctagccaaaggaagcgaataatcatggggaagtggttattccagctgtgacactcaggaaatttcagtagaatgtgatggccttatatatggaatattcttagacatactaggatggcacatgtaaattatcatgggaaacataatttgaggaatacagaagattataaggtattatttgattcaggtttttttatgttagtttggagccattgtcaggcatggaaatactttcattgatattcctgtcttctataattcaaggccttaataataaactggttttgaatcaatcagttgtctgatagacggctcctgggaagactggagagccttatgagggtgcccacctctctcctgtgtaaaaggcccttcactctggcagcttcactcttgggtggtgttgggtagaagtaagatcagataccctgctcactgtaggatggaagggatcacatcaaagctctgagggctgttttcccctcaggcatccaaacctgatttcctcttatcacctgatatgaattttcgactgtttcactttttccttctctgtgcttgtgttttttacaaaaccatgaagcctgtaaaccacacggtagatatgatcacaacaatattagtggagaaccccatgctgttgtcaggatcaccatcataggtatgagtgcttgatgcagggtgtgagggggaagggggcagtctttttaaaaagcaggtcacggctggacgtggtggctcacgcctgtaatcccagcactttgggaggccgaggtgggcagatcactttaggtcaggagttcaagaccagcctgaccaacatggtgaaacccgtctctattaaaaatacaaaaattagctgggtgtggtggtgcacatctgtaatcccggctactcgggaggctgaggcaggagaatcacttgaacctgggaggcagaggtttcagtaagcagagatcacgccactgcactctagcctgggccacagagcaagactccatctcaaaaaattaattaattaattaaaaattaagaagcagattacctttgaacctgtttagatagtggtcttccatccatcacctcttaactcctcatctcccattttcccaaccccacacacctcatctttgcatggatgaagtgcagtctctccagaacgtttttgtgagtggagggatgcagagtagattgtcggtgccatgtctacgttgttaactgcagtccaacatgtaatctagttaaaaaaagaaagaaaagaaaaacccataaaataaattttaatagactacccctaggcaactttgaagaggaaatcattgcaagaaaatgagacttactaaataggccatttgagaagcaggcaatggctattttaaaggcttgaggttttaatatatgtatatgccttttttccctcatctcttgcaaataaataatggtttacatcaggagacaattcaggaaaaaagccttttaaaaaattttcaggaaatctggccaccgtgtttctgcagccactgataaatgacaatgccaccagcagtgacctaggacatcctgaattcttgctcttctgaagagcttgcattctcttttcaaagggtatcctgttcctattgcaatctttaagctatctcagctcaagatcaccttttttccttttattatcatacttaaaacagcactagtgctgttaagaagactccacccatagatgttgatgtcatttgtgaggaggacaagatttaaagagaaggtaactgggccaggtgtggtggcttaagcctgtaatcccagcactttgggaggccgaggcgggtggatcactaggtcagaagttcaagaccagcctggccaacatggtgaaaccctgtctctactaaaaatacaaaaattagctgggcatggtggcatgtgcctgtaatcccagctactcgggaggctgaggcaggagaattgcttgaactgggacctgggaggtggaggttgcagtgagccaagatcgtgccactgcactccagcctgggctgcagagcaagactccctctcaaaaataaataaataaataaatagaaggtaactggatattggccccaaacatattctaattcagcaaacagacccattgaaactcagcattgttatttcaattcatgttgtacaaatcaactaaatacaattttgtctattttcagggataactgagtgttcttcatccacaaaggcccaagtccgtataggacagtagcacaacggggaagaaatgtgtgtttttttttgttttgttttgttttttagtgctgatgaaaggtgttatatccaagggtaagttataaacagagaagctgtttctgattgtgaagattggctcagcctgcactgacacttctgaaaaggtggaaagagcaaaatcgcagttccctagagtctctcagttgtgtgatatccatgcatgttcggagcagaatgtataacggatccaccgttctgcttctctgctgtcttctagtttaaaacatgttgcaggctaaaatgcagagggagaagattctattggtttactcatccagttattaagacaaggatgggatgaaggatcagtcttcacagacctgcaaattccctccagtattgaccctgttgttgcctgagggcagctgggtcaacaggtataacctccctttttttccctgaacaaaggtagctggactttcaaggaaaaaaaaataatccagccctggtaatcacacaaacagttctcaaagctcaattaaactaaaatgccttgtttcagtttctttccacagtttatagattttaccagcataattatcaaactttaaatgtttctctcttccattgtcttgttctgtttggttcacctggtgatgtttgttatagcctttctatttgaggaattagtggaagataaaatgttgctaagagcaatttcgttagtattgaaaatagcaggaaagaaatagagggagcagccattgttagcaaagtagcctggttatgtgtattaagcttgggaaagaattaaggccatttggtctattgatgcaaaataccttcgttttactaaccacagaaaaagcccttggttgggttgtcttgagtagttagaactgggggtggccaagatgactggttgctgatttccagcactgtgcatcaaccaccaaatgattttaactttcaaagtttatggggaaagggtacgatatgaattttgaggtttttgctgcttcttatgcaaaacattatttcggtttcaagcagctgatcacaattgcaactgcttatacctggtgaattataatattctctatgggaactgcactgcatgtctgtgggggccgtcccatctgcctcctttgtgaatctcttctcctttcagtgcctcctaacttgggccccaaagaggggtacagcagctgaatgtcattctcttgggctgtggcccaggcatgcatctttctggaaggatgactgaatcccattcttaaatctgaagttcctcttgattagcggctccttttgtttgttgtttttaacggcatttctgtctttcatgggtagcttacagggatgtgttttagagccccttccagctgggaagccgcccaactcccaccagctgagtcgggggatggcttccctttagttccgctgctgtctgtggactacaaggactccacttccagccccagcaacagtggcccttgtctgctgtgcaaacttggctctcttctctgggttttcattctccagccatctgggcattttgggcacccctcttatcttagtaccttggcactcaggaccacatgtcatcctatcatagagatgcaaacaaaggaatccttcacctctagcttgcagttcccctggaaccatcatagattgagtgacaatcagggagatgggggcttgggcattggtcttgagtgatataaatggtttttctaatagaaggcatttggaatgggctgacaatagctaggattgttcactaccaggattcttagtgcctagcttcctcctttttctctggctatcttgaaatctaggaggaaggagctaaagaccccgtggcctctgattgccatagcctctctaggcctggaagcttcagcttagggactagaatactgctgtgtgccagagcagttcatctagcttcctattaagaattctatgtgcattacccacttttaaaattcctcctcctacttcctcaacttctggcttggggagggtttgatcagagtcattctctcttcagagaagcatctggaaagattgatccaagagtgctgatagcaagttcgctatcatcgccctgcctcgaggaaaataagcattcgataaaaggacacttccactgcccagttcactcctactccactgtgtcttctcctgtccctccccctacccctctgacccctgcactcattctgatccctcttcctgcccgaatgtctctcagtggtcaacaaggcatgagctagccaaagaaaatgcaaccaaatagtgttaatcacttccatttagacctcagtagtcaggtggggctgcaggtctttgaaaggcagacttaaaatgcttgcctcttttcagcgaatctgattttacatttggctgctgatcattcagcccctggcatttgttcatacattggaagcccaaagcttccacacagttgagtctacagagcagagtaatattaacaagacttatcttggttatgatgccaaaaccatggtgccacttcatttcacaccaaagtggatggatcttatttatttattttttaagagttgaggcagcacagagaagctcagagattcattcaggatcatccactgtgtccaagctttgatcctctggcccttatgacaggcaatgatggttcagagtacagacagagctcctgtagagcgtgcgaccaatttaactggaaccatgggttcttaattacgacttcccctccccacccactgccaccaccatccagttgccagaacccagttggttttctgtgaaacggcagctagtgacactttgcatgggttcaccagaaggcctttcagtctttgtctcattttaattgtgtatctcaaccaagaagatcaactctccacatgtaaagttaactccctttagttttcaaagtttctttccaagaaccacctattgtcagtccctcatcctgtgtctggcaaacttagaagaaacaatgaagttcacagtacagactgagctcccgaagcactgatcttttatgtatctaaatgagggaagaaggaatgcatattctctggcacaagctggctctaccatgtgatttgaagtaaatggccattttatttcacattaggaggagagacttggagcagtttggcagcagatctgtagcgggttattaatctaagaactatagttttcttccacataggagattaaatacccatctttcgtcagatcaaagcaggcctcttggactatctgatctttgcaaaaggccccatgttgggccagcacaacagtctttgcatgtattgctccctatgttaaaaacaacaacatcatcatcattttagtatgtgtaaataataaggtctgccagcattagcagctctctaggcccaaagtaaaactttaggttttttttctttttttctttttttgagacagagtctcactctatcacccaggctggagtgcagtggcatgatctctgctcactgtaagctccacctcccgggttcacaccattctcctgcctcagcctcccgagtagctgggactacaggtgcccgccaccacgcccggctaatttttttgtatttttagtagagacagggtttcaccatgttagccaggatagtctccatctcctgacctcatgatctgcccgccttggcctcccaaagtgctgggattacaggcgtgaaccactgcacccagcccctaaaactttagttttacttgaactgactttatattaattttctactactagaacaagtcactgtcccccagagtttgaagaaatgtgaatattaactagggcttatctgaatgagaacaacagcattgctcttttcgtagtgttgtaataaatatcatcttagacttatacggcattttctttagggcattaatagagtttatataacctattgttcatttacttgatagctcattgagacagtttaggtattgatgctatattcaccatctataaaatgggaagaataaaaatattaagttcaacttaaatgggttacaagaaagaatacagacatttgtatgatctatgtctccaagatactgcctagagcttttaaactttgtaagttctgcatttcacctacccaagggagtctgagagtgtgtaatttgggccagggcacaacagcccttggccaggttgaagtggacaaacaaatggaattggttccagtttaccaacctggcacgaattatgtgctggtcaaggaagtgtttttcaaatcatggggagccactagtgaaaatctactggtgctttgatggtggcctttggagatacttttataatttgaaaccattcccatggcaggccagggagaggtcttactttagccaacatgcaacattaggtagaagaaatggggcctttctgactggtttgacctgtgggtgggccctcttccacatgtttctaattaggatgcaagaaagagtagatattctgtggcgactctcctttccttctcggctgtgagacagaacaacagcgcctttgtgatgacctttacagggctgtttacatttggtgacctgcctgaacactcccgccagagtggacgcacctcttggctaatgaggaacagccatgctgtcttttactatggtagaccttggaggttaaaatgaaaaataagaggatcctctgttgatgactagtcgaagttaattttctttacagatttattgaggtataatttacatactataaaattcacccattgtaagtatacaattcaatgatttttagtataataaatttataaagtcttgtcatcatataatccagtcttagaacttcgttggagttattttgaaaacaccaaataatgatcataattggaatgtagatcatgctgaagtgaaacagaaatttatgaggctatcttgggttaaggaagagggccacccaggaaactatttgagacaattaagtctcaagcttctcaaaatacatgaaaccttgagattagcacttatatttcagaacattttccatatttttgcttaccaaatggtatgacctacttgaaaaaaaatgagaagctgctgcagaacctgcctcaggtgtcagcatcaattaatgtttcatggttataatgagaaggagcagaagatgagagtctaagctccccttaaagggcttatagttcactttgaacatctcatcacatatttatttacgtgccctctcattttcaagtactgtgttaggtactgcagacacatggatagtgagacaatgtctctacccttaagaactagtagtccagtggtttctgttaaatttcagtatgatgtcataaattctgtggtaaagtgccgtgtgatgtcaggaaggtcatcagtaaagactttctagagttgatgttactaagaaatcaatgacatggttaataagctcactagtcctgctgacactgagtccctaccctcggctccatttggatgaggctctgtgagatccagtccctgccttgggggctttgtcattcatgagagaaacaagtccatcactccttccagttagatatctgtgaaaaggtggaaaaagcaaagaacacttggaatttgggagagaaagagagaccatttaagggaagaattgcatttgagttgaattttgaaaaaattgagataggcttttgcccggcatgggtaaaagtgggaaacagtccagaagaaagatgtgagcaaaggctcagggacaggagaacttgggatgtgttctgagaacagtgagtaatccaaaatggattgatacatatatcacatagtatagctatttctatatacttatgtcagaaacaagggaattaagggaatcacaaggctctgctttgcctgtatcaaggaaggcttcctagagaagccattaatttcactctgtctgttatgcatgctttacaccaaggtgatgtgattagttttcttctttggtttcttctttctgaattcatcaggtggtcacacccactgggccacagaaagcaccagtggattttcactagtgattcctgtgattaaaaaacgtttttgaccagcacataatttgtgccagatttgtaagctagagtgaattctatttttgtccagttcaacctggccataggctgctgtaacctggcccaagagcttaatgtaatactttcaagaagattaaaaatccaacaatcccttgaaacattggttgctaacctttgaaagagtagtcactgcacctgaatagccttaggaaatgaataggaggtctgagaaaaagaaaaaaaagaagagtggtaccatttgcttaaaatccctagggccttatagggtaaacctatttctaaatttaagttgctaagaccttgaacctggggttgtttggggatattttggaaagtaaggaatattattgactttccatcaggaaggaaagaactcagttgtttttgatattactaagaaagagagagttttgcatttatttgtttgcatggacggtctacctaccgtgtggccttgttcatgacatggcggacctccctctctggggtcagtgtgaatagccaggctgcagctgtagctagagacaatggccagcactgttgggccttgccccttaagccccgaaggttaatttcctagtatttagtggcattgaacccgccaaagaaaatgctgtttcatctgggggaagataatttctgcatgtgtatttttttcatgaagaataaagaagagatatttttggaagaacataacttaacctgttggccttggctaggaaagctaaaaaagcaaggggtcagtactcttacaagtatcatgtcttaaacgtcagccaaccagtaattatttagatgccatcagaggggaagtcccatcccattgttattttttctctagactgtgagatgctttaaaaaaacctctctgtagggaaatgatctttaaaaaacaaacaaacaaaaagcctgagaatttagtgctgcatttgttgagaagtaagggccctggaaacggaggagtttttgttgttgttgttttggtgactgctttgccactctgcatgttacaaagggcaaattcttggccactgtttagggttcccaaaaaattccaagatgtccagttaaattagaattttagataaacaacaatttttgtatgagtacatctaaaatattgtactgggacctactcatacttcaaaattattcattgtttacctgaaatttaaatttaactgagccttgtatttctttttgccaaatctgcagtgctttgttacttcaataaaaaaactgtccaaggagcctgggagcttttatgattattgaaaatcactgtcaattttaaacctaaacaaaacaatagataaagctttgaaaatagaatcaagtccagtcataccaagtgaaaggagtcctttctcatttttttatcttcttgtagccagctctggggatccaattctattgggaatggctcacctaggtctactgtagctcagagttataccttgtagatcacctggatgcttctgtgttccagctttaactcagaggatcaggtcagaatggaggctccctttgaaatctaaagtgcttagcttctttagggtagctccacaccctttttaattcttctgtaaaatgtctatctagcctagagaagtggagtctcactagacatggttctgagaataatagctatcatttactgagtgcctaatatgtgccagtgccttacctgcattacctgcctgagttcatactgccttctaacaaccctatgagacagatactgttatctccattttacagatgaggaaataaagacccagagaggtttagtaactttctgcaggtcacagagccattgaaaggcagaagtgggataagcattcaaatcaatctgactccaaaaccccttcagtaaccattgtactactgcatgtgatgcccttagattctccacttttcctctccctccccaagcccccagtttggcttgatattggaatcatccctttctctccttgttctttactggctggaattaatagagtactttcggtctgaaactggccttaaagaatctttgtccgtgtgtatcacactgcaatgcaatagacgcagaaatctgggcactagaaggtgttaactttggatgcctcctgttttatatgcatatgattaaaccaatggggaaagaaagccctgaaactttattacaacatttttgtagtattaaatttgacatattaaaatgtgttatcattttaatatctttaaagagcctgaggagactctcaagccttagactgtaaatagctaacagctttgagatgagcttacataggagtcaaatgattgttccaagatggctgttctaattctgcagagctaccgtagtattcagcctactgcctgccaaaggcaaggggccttgcccctctcttcctcctccctgctttcctctttgttaagaagtaacaaaaatatactgcccaacacccactttcttttagaaccaacacatattccttctggctcactccctctataaaatgatttgtcagcattttgatctcattaaataaaaagttttacttggtcaaactgggaaagtttatgaagttagcccttccatcccatcatctgctgtggccacagttgttgactgtgaaatagctctgtgggtgtggtctaccaagtatcccaatagcatttcttacactgtgggctatggacccaaaggtctggaagagttgttttcatagggtcacactagaacactggctctttctggttaaaagcttccctagcctttctcctccaactcttaacacatctctcatgtttctttcccccctgcagaagtatagaaacctcctcttttcttttcctctgcactctcctcatctgtctccaagtccccattgtgccatgtttctcctacttcctgtttcctttaaccactaacttctcacgatttttaaaatcaagcctatccaattctaaaaggaaattgaaaccctgccccccaaaaaagtaaaactagggggaaaaagccatagtaggaggtataatgttatgatcttctctcttagccctacacatctgtaaaaagtaatcttgctccgtactgcaagactagggcagcccagtcgcccactccccttttattctccctcctcacattcccctgtccttttctaacccaccttcccacttagggtctaatttagccaatttatacactcgccaagcttgcaaaggttttggttctctccttttgggtgtggaatgctggtgccacaggggctttcagaaacaatttagtaagtgatagacttggaagagttcaaaagcagctctgggaagacatcactgatgagtctctgctcttagcattttgttgcctcttagaggcttagcaaatagcagcatttgatccataatctgctctttcttggtacccagagaggcagcacaagggtagaccttgagcaagttacttaaactctgagcttctgttgccctttctgtaaaaaaaggcaaaataatcattctgacctcacattgttgctatgaggattcagttagttaatttttaaattttttaaaattaatgtgtttatttttttgagacagggtcttgctctgtcatccctgctggagtacagtgctgcgatcatggctcactgcagcctcaatttcccaggccccaattatcctcccacttcagcctcctgagtagctgggaccacagctactcccacttcagcctcctgagtagctgggaccacacctggctaatttttgtatttttggtagaggtggagtttcaccatgttgcccaggctggtctcaaactcctgagctcaggggatctacctgcctcagcctccaaaagtgctgggattacagccatagccactgcgcccaacacaatgacttaatatttataatacacttagaacagtgcttagcatgtagtaagcactagattaaataaatgtataaaatgaaggaagaaataataatagtgtttttcttttaattcatgcatgaagaactatgttcgacttctgtatggtatcttgaaggggtccaaaataaatctgaccggcagtttgaaggcctataagagagcatattacataatttcactcaaggattttgacaattagtccagcttgatggatctcttctcacctgtattttggccaaactgaccaattatttcccattccaactgccatccaaatttccttccccatcccttccacatgtttcagttgcttttgctgcctttgcttcatattgactgtcaggatgtatggccctgtaatactaggtttttatttaaaaagcctttctctcattcataagcttcttttgaggagtgaggcctgcatttctgatggttgtgtatcattcccatgccttgtgcataagtggtactctatccatgtgttttgattggctgatttgagcttttgcagattaggaaatagttggcctagagctaagtggcacctgagagaatcttcccctccaggcctcacagatgcactctgtggaaaggccattgtctccttgctttgtgttggactattaggaacctaaaagctaggacaggcctgggtagagatagccacctttaagttaggggaatgttggggagtctactgggatttgactgtgaggtgaaaggagggctgcctacaagcagaaagcttaaggcattggctttgtgtaattaccaggaatgcttttagctagcaccttgaacggttggttaaaaagggacagttagatgtttgttagatgtgtggtgttaataaccttgaccagtagattcgtgactatgagaatttcaaaaggcgaagcaagaacacacacagagggaaaacatctcttgtttctaggggcagccttcccagcagcactcagcccagagctgtttttcccccaaggagaacacagggacaaaataaatatgccttcctgacccaaagacaggagcgcccagggagaccatgggatctgggagtgagagcagattgtagggaggaagtatccaggatgagactggtattagctacaggctggacagttagtcggtggcagctaggtactgctgctagtggctgagggcagggtttcttagagacctgaagatgtgagcattcatttatttgttccttcatcattcagcaaacctttactcagtgcttattatgtactggatactgggctgagcccccacttgtgacctcactgggcattgagtctgaggccttggcagctaagggtggtgttccttagggaactgggaggccatccagacaggaggcacagtacaaacaagaaagaactaggggccaggtatggtgtctcaggcctgtaatcctaacactttgagaggccaaggcaggtggatcacttgaggtcaggagttcaaaaccagcctgatcaaaatggtgaaaccccatctctactagaaatagaaaaacagttagctgggtgtggtggcaggcacctgtaatcccaactactccggaagctgaggcaggagaatcgcatgaacctgggaggcggaggttacagtgagctgagatcgtgccactgcactccagcctgaatgacagagtgagactcctggggaagcccagccctgcatcagagaaagtgatgcactgatgcttcacacacagagaatggaagcgggagtagaggcatttttctggagttcaagcttcaccttcaagcatgatattcagattccatgagagcatgcagaaagagcccagcggacctgttgaacagggcataccattgtgagtccttagaagctaaaagacagccaagaacagtaggaaagaagctgagaataaaagctaagacaggtacctccaatctctaaaaagttaaacctcttagaggattataaataaagccacactcacaggtgtacatgctataatttattttataagtgcctggcatattaataaatggtatgtagtttacttacagtgctgtttgggtggttctcaagtaatctcttgttttacattctaaagtccactcagtgttagaatggaccatttgagcccaagtagattcaacaaaccatctatacccaacccgcacatctgggcagggatgacacttgatgagccatccaggcctcatctcatagactctattcatcccctgctgtcatgggcaccaaaacattttatagtaaattgcacagtagtttgtctttcccaataaactgtatgcttcttgagggtaggtaccctatctctttatctctgacacctggcacacagcccagcacatgacaagatcaagaaccaggactggccggggctcagtctgcacgtgctctggctttcaagtggcatcttctaatgatctgaaagacctctctagaacttttttccttttatgttatgtaaataatatacttaagatagaaacttttgtgtttcatgttgtatattaatgttgaatataaagtttttttctagagtgtgactattttttcacctagttccttcaaattttcatccctaccattagtttttcaaagtctctggattcctgttgaagtatccttttctctggaggtttatatcacctcctaggctgcttttgacttatctactcatgctttacttcggtagtgctgatgctcacccccagttattcctcacctgtaccatgtggtattattaatgcaaatgaggctttacccggctatcccctcccctagcatttatgcattcttcagggaaaactctgttgtatatgtctctgagtctcccacagcaactaacacagtgccttacactccattagctcctcaacgagtatgttttaataaattccattagtggagtgaggtagttaggagcaggtatgagctcaggcctttgagtgggacaacctgggtctaatgctgcctccttcactaactacttttatgatcttgagcagtctgctaatcctccttgtgtccaacttcttaatgtttaaaatgaggataatagtagtacctacctaataaggattaagtgagttaagatatgtttttgagggttaaatgcattaaaatatgtaaaacacttagcacaatgcctggcctgtagtgagagctatcattatcaacaaccaccatcataggtacccattatcagaagttgggggtttggataaagaaattaagtttctctaggttatatttttgtgaagtctgaactggaatgaacttcttcagattcctcatagagtacttcatgccccgcccttttattgcacagggactatatctgcttcagtatgatgtagaacatcttgattaagagtatttttttatctttcgtccttgacttatcttttggtgtgtaggtatattgtttcatcacattctcatttttttttttttaaaaagagttgttccatttcccctttttctgtctactgctttctccttctacgcttaggccaagagtatattacacttggaggcatctagttagcgtggtgcttcccaaacctttccaggacccaaaataggctaaataccacaccaagggagacatcgatgatgttctattaagaacagtgaaagggaacccaggcataaatatacactcagtatacacaactgtcaccacccatagcactgaccatcctattgtaccttagaacttaacactgtaatttatctgagtgttttttaatggctctctactaagtgtcaagctctgtgctaggtctggggaatggaaaaatggtaagacatggttcttgctgttgaggtgcttagttgtaacaatttattttcatcttttattaaatactaattgaataatgttgttattctttttttttttttttttttttttttgagacggagtttcacgcttgtttcccaggctggagtgcaatggtgcaatctcggctcactgcaaccttcgcctcccaggttcaagcaattctcctgtctcagcctcccgagtagctggtattacaggcatgcaccaccacacccggctaatattgtatttttaatagagacggagtttctccatgttggtcaggctggtcttgaactcctgacctcaggtgatccacctgcctcggcctcccagagtgctaggattacaggcatgagccaccaagcccggccaatgttattattctttaagtaaaacatgtttccccaagtaaacttactgtgtgtttagtaccatcctggaccctcttactcacagtgctatttgccccactactacccagtaaaaagaaagggtgacaggttgtaaggacatgtaggggtttgaggaaagttgggcttgtgtcaatgtaataaaagccaagtagttcttcttccagcccagtctgtatctatgactagatcatgaacagagaactaaaggcttttgattataaacctccttatgcctaggcttggcccacactcaactctaatacaaatagtagtaaatgttaggagtagacataaaatgagcacaggttgccactagaactttttctataacctaattacatttttttcaacctaaaatattacatattgtgtcagccaggatgccatcaggaaagagatggtgcactttagtattccgaggctaattacagtggggctccattagtgcccctagattgagaaggtgagggaacaggctggtttctggaagcaaggagatagagggggctgtgtggaaaagactgcctagcaggatctgagaccttccatcaagaggcacagccagtccatagcccaacatcactctgctccttcaaatctcctactggtgcaccccagtggcccaacccaggagagtcctgttgatgtgacacacacaggccaggtcccagggcagagagcaggtgaagaatgattgtgagtaaatctagaggggcacacaggaagatatccagcaaacatgtttcacacttgattttagaggtaagggtgtgtatcttaattttatctgttttagaaaactaaaattttaatagatttaaagtatttctgccatagttcttaaactatcaatctgatgatgtcagatatttttctcagtgtcattagtttgacctcccgccacatttttttggtggagaggggtgagggattgtgtataaatttcctccagagcacacagagaataaaaatgctattcttcagtttgtttttttttttgttttttttttttaacaaagagttgttccatttcccctttttctgtctactgctttctccttctacgcttaggccaagagtatattacgcttggaggcatctagctagtgtggtgcttcccaaacctttctcagccaaagactcctctgggaatccaactaaatttcctggttcccttttgcttttaatatcaatgaccatattacccaatgaggttatttttatttcttacaaatatttttataattaacttaagattcaacaaggagccaaaggtaaacagactgtaattatttcaagttctaaccattatgagtagatattaatcttcgagaaggtattattaaaaaaagtatataatattcataaattaaagtcaacttataagtacaaaggaatatctgtgactataaaaggaaaaataaactggaatttaaaatttaatcactgtgccttagtaaacacgatcctggtacatttcagcacagtatttgtgtttcagaataggattttgtcttctagttattcactaatacgtatttattttactatcattcagcaagaaaccctttaaatcactgtcaaaaggtaggtgatttactggaacagctaacctacctctgcctagagtcccataggcactcacttccctatggaaccctctgtcccttcttcccttcctatatacctcaggtacctttatgcagccttgttctattgccactctgcctgttttactaagctgccctaaagtcactgcaaaattttgatcagaacattactgaaccaggacacaaagaaatgctcattacaggctttaaatatatgctttttcttagatctatgggaacaatttctctaattcttaggttttgctccctgaaattacacagaaagtactgtatcttcttaaccctttctccacccctcctttcatttcaacccaacaaacttttctcctgtgcattgctaggcagtgcttccattgtccttaagtgtttaaggtcttgtgctggtaatgagccagtagtcacaaagctagccagtgaatttgttcttcaagcctttagtgattccatactccatataatggactataccatttgtggattccttgacagccatgaggagacactgacggagctatgaatagaagaaccctgtgttctcccctgtccagctcccctggcttttggaaacagaacttcaatttttcttctccatctatgtggttcacatggaactgaccccatcctccaactctagaggttgtctctgaacttgggtcagaccaaacgagtttcagtgcttggtttagaaatgaatatgtaaccgaagctgagcatgtgagaatccaaccataagaatttggccgagccttctggggaagaggagcctctgtaagctagggtcactaaattggtacagtgaaagcctgtagccaccactttggagaagcctgcctaagactaacaacacactgcaaggaagagctgaaagatggagagagactggttctcatcatcatttgaccactcaagttcagctaccttggtcatacaacccgttaaatctatccccagccctaccagttattttgtatattatgtcactttttatttttatttatgtatatattttttgagacagggtcttttgctgttgcccaggctggagtgcagtggcatgatcatagcacactataacttcacactcctaggctcaagtgatcctcccaccttagcttcccaagtagctaagacaagaggtgtatgccaccacatccagctaattttttattttttgtagagatggggtctcactatgttgcccaatctggtctcaaactcctggcctcaagccatcctcctgccttagcctcccaaagtgctggaattacaggcatgagctaccacacccaggcttattatgtcaatttgaatgtgcactctgtcacttataacccaaactcctgagtcaaataccagcacatctgagaattcaacaacttctgggatccacagccccatggaggctacaagctactaaaaagataggaatgtcagcttcagctaagaattccagaaatctacagaaggtacctttccttttctttggttccagagagcatgataatatacatacagaattctggaaacttgggaccaataatagggtgtattaccaactgtgtgtggtatctgtaattaaatattgctaaaaccctgtagaggctggtttttacctttaaaaagatcatcttaaataatctgaggatttttattttaaataagttaatgttaaaaatattttttgggccgggcccggtggctcacgcctataatcccagcactttgggaggccgaggcaggtggatcacgaggtcaggagatcgagaccatcctgaccaacatggtgaaaccccgtctctactaaaagtacgaaaaaatgggctgggcatggcgctgcacacctgtagtcccagctactcgggaggctgaggcaggagaaaggcatgaacccaggaggtggagtgtgcagtgagccgagatcgtgccacagcactccagcctgggcaacagagcgagactctgtctcaaaaaaaaaaaaaaaaattgatagcatgaaaatttgaagtaaagagtcaattatgttaaagaaaaaaacactccaaaatctaacatgatgctaggctatgttaacaagagcctggcattaaaaactgagtcaccatattcagcattaataagatactagcaaagctctcattcagctgccatgcctaggttgtgcttctgcatgttcagaggatgtggaaagcaattgagatgattaaaagcatggaaaatcacatctctgaagagcgatgaaagtaggctatttaactaaaagaaaagaagattgaaggaagaaaataaatggtgtttaagtatagaaagagttcttataaagaaaaaggtgtccagatgtttcccccttccactgagtatattaagagaaaattgccttagacatttcatttttacaaaggaaggattttttcaagcaaataggattcttgtactgcgtgtgacattggactagatgacctttaagatttttcttcactaagattctatgattaccagattgaggatgtacttatcaaaagagtgtggaaccacttgctgtatgtcttaaaaggtaagatgaggaaacactggctggtttgccttaggtgtcattctgcccaggagttacttccaacattcataacatgcctttgaagaagcaaatattgtatatagacaaacagcatatcagaaaaaaatcaaaacaaaaacaaaggaatactagcattaaagtaataataaaatataggatttttattttctactctttcagtatagccattagcaattcacagttagtttcttcattaactagataagataagtgaggcaaatcatgggacagtttagtattggtgacagtgtgtttggaggggtagaattaagtgttccatatggaatcaggagcatttaatgtcagctctagtatgtatgtggcatatttcctactgcaacttaattggcataattttggatccagagaatacaaaccaagactcagaaaactatattttacttttaaaatatagttttaaaaacaattctaggtttatacatggaaaagctattctaaagaacaatagctggccgggcgcggtggctcacgcctgtaatcccagcactttggaaggccaaggcgggtagatcatgaggtcaggagttcaagaccagcctggctaacagggtgaaaccccgtctctactaaaaatacaaaaattagctgggcatggtggcgcgtgcctataatcctagctactcgggaggctgaggcaggagaattgcttgaaccaggacctgggaggcagaggttgcaatgagccaagatcatgccactgcactccagcctgggctacagaacgagactctgtctcaaaaaaaaaaaaaaaaaagcaatggcgttggcattattgtggtttcaatggatctatacttatttaaaacttaaagtttaaaaaaaaaaaagtccatatgttgctccacatctttctgtactagttgggccattttgttgagttctactatgtggcaagtcaggatgttttgtgtaagtacaagctcctgtgactatagttttcatgcatccacatatctactaattagctccacaactgggttctgcaatttcctgggccacatcgctgagacagattccgcatgttctgcaccagcagtcatttccccttcatggagcccacatagtcacttaaaagtaatttatccaggagggtttccagcttttaagtgagtctgctaataacagaggttgtctgacttcacaatcaattatcctgcatagattcaagtgataatttctatatttgtagttttcaagttgcagggaaaaactgggaagggagaagaatatcaattctgcaaactggttattgaaagtattgggggggtttgctgaatatggtgattttgatggaaaggaatcttaacaataccccattcatatgcattttccaattgaattatggaagaaaaattaacttagaaaaccaagcaagcaagcaaacaaaaagccccaaacaacagcagcaaaacccgacttccaaaaagagttcacattataggcttacttttaaaaactgatctagaaacaagaagctggtttctaagtttatttccacacttgccctctgaaccctgtcttgttgaaagattcaggatatcagattctctcccataatttcctttcaacagaacttactgtattacccacccatcccccaaatataaatggctaaaacagctggctctttcagtcttggtgtatacacacaaacacaaatgagatacacacacacacacatgtatattatacatctctgcatatataaacacatactttggtcatttatttttttaacagaataaaggtaatttatcaaaatacaattcattttaatagttgaggcttgacagagatcattatttcaagaaaagccaaggagaataagctccctttcatagtattgttttctttctaaacctctatagggtgcatggctcttaactactgagaaagtttgggacagcaccatggagcagcctcctggcctacatgttaaaagatctaaattctcttggggaaggagcttataactatgtattcactcaccccacagaagagaagattttgcatctgttttatttctaattctaggctgtctctagttagccatagggcaaaaaaaccaaaactatttccccctctttccctgaagaaaaaaactgaagtgcagagagagaaataaatatctttttcttattccagttcaatttagtttcatttgttcttttctttaatattttgtgagcggagaagaaacatctttaaatcatctcatctatgtgaaacctgtttttagagagtccagactttttctccttcattctgtgattccatcagtgatgctgaaatgactgatttataattctccttcctactgactgggaaatagaggtgtatcatagtggagggaccaggaaaatggataggtagatgaaagagaaccagaggaccctgtccacaacccacccacccagctgaggactgttagctggtccatgaatagaatgctctcaccctttctgcctctgcatatactgctctgctacagagccactcagcagagtggtgtccccttgacccagttggggccatcccgggactcctgtaacctaggaccttctagccttaatcatatcatcatatgtaaagaatgcctacaaatcaataaagaaaaatagaaaaatagacgagggatataaactggtgatttttagaagaaacctgggcattcaactttacaagtcattaaggaaataaaaattaatacaaaaatgagatcccactcttgccatcagtttggcaaaacaaaacaaaaaccctaaatgttggtgagcatataagaaaacaggaactcaaactgctaatggaagacgaaactggtaaagccactttgaagaactatctggcagcctctagtctgatgtgaacaggcacaagcactgcagcccagcagctacacttctagctgtgagccttagagatacctttgcttcacaggtaaaattatgtacaacaaaggctatatttatttttatgttttaaaaaggccagaaggatgaacaccaattttttctttttaaaattaatagataacattgtacgttataatcatatacaacatgatgttttaaagtacacatacattgtagaatggttaaatctagctaattaaacaaatgtattgatcacatagttaccattttgtggtaagagcatataacatccactctctacatttttcaagaatgtaatatatttttaaccatagacaccttgctctttcataggtgtcttgaaatttattcctcctgtctcattgcaattgtgtatcctttgaccaacatcttcccatccccctctccaccacaccccagcctctggtaaccaccattctactgtctacttctatgtaatcaacttttttggattccacaaagaagtgaaatcatgtggtattttgttttctgtgcccggcttatttcatttaacataatgtcttccaggttcatccatattgtcacaaatggtggaatctcattcttttttatggctgaatagtagagtcaaccctagaaaaatgcagggatgaggggtgctaaccctcacacagtcagaaatccacaaataccttttggcttctccaaaactttattagcctactgttgattggaagccttactgataacataaacagtcaacacatactttgtatattatatataatatatactgtattcttacagtaagtaagctagagaaaagaaaatgttattaagaaaatcataaggaagagaaaacatatttaccattcattaaatgaaagtggatctttgtaaaattcttcacccatatcgtctacacattgagtaggctgaagaacaggaggagctggtcttgctgtctcagaggtggcagaggtagaagaggtggaggagtgtagtgggagataggagagacaggttggagtagctttattgaaaaaatccatatgtaagtggaccttgcagttcaaacctgtgttgttcaagcatcagctgtgttccattatgcatataggccacattttttttatccattcatctgttgatggacctttaagttgattccatatcttggccattgtgaatagtgcttccataacatggtagcacagataacctctccaaattcttggtagtggttgtcactggaggaagaaatgtgattggcatactttacttgatatatcatgtgatatataggatagatatatattttatgatatataggatagatatatcatatattttatgatatataggatagatatatattttatgatatataggatagatatatcatattttatgatatatatacacacacatatataagtattatatatgtttttatatatatatataaaaaaacaaacaagaactgaagaaaatatagaaaatatgttggctgggcacagtggctcatgcctgtaatctcagcactttgtggggccgaggcaggcagatcacttgagatcaggagtttgagaccagcctggccaacatagtcaaaccacatctctactaaaaatacaaaaattagctgggcatggtggcgggtgcttgtaattccagctactccggaagctgaagcaggagtatcgcttgaacccaggaggtggaggttgtagtgagccgagatcgcaccactgcactccagcctgggtgacagagtgagaccctgtgtcaaaaaaaaaaaaaaaaaaaaagaaaaaagaaacagaaaatatgttatatttttctctgtacttttctgcatttacatttttctcaaaattaaaaaagtagatagccactctttcagttgattagtacaatcagcatactttagtctcttagtaattttctgatttgcatctttgcagtccctaaacagtctttcctctatgatactaacaggtttcactgcaaccagctcaccttcctggatctggttttaagcttggtgaaggcagtgctgataaggtctgacaatgtggggagtggtagaagaggcttggaatcttttactgtttttcatagcatttcagagagttggaaaatagcttcagggatcatctaatagaatttatttatttaaatgaagaaattgtggccttgagagccttgttcagatgcacctggctaattaaaggtagagttagaatctgtaactactgattttctagtaacaagagcagaaagttctacagagccttccccatggacaatcaggcacccaccatgggtttggtattttggaaatagccattaggttagcaatactttaagggactagaaggagaggttaaaagtctctgtggtcactacattcaagaagcagtatagcataaaggctgagagaaggtttatcagaagccatacttgcattggtgtatatcttggctctgccacttccagctgttttatcttggataagttacttaacctgtctgtgccacagtttctttaattgtaaaagtaacaataataatagtacctatttcagaggttattcggagagttaaaagagttaataatatgtgagaatgatgtctgatatataatgtattcaacaaatgttagctattattatttcatttggagaacaagctattaaggaaactgaatgtttaattatggttctgccatcttttgctttaaaccacttatctctcaaaactgtcctatcttcctttgtatttaacttggatgagtcttggttttacaataaagaaagcagaattcaaaaaggtaagatcatttactttcctagaatgatgtcatacatctgtggtaatgattatatttccttttcattatatttcactcaacacttattcatccctattggtatacatgggggctacccatgggagatgtgaagcaatctagttgacaaaagaaataaaggactgagtccctgggggtgttactgtccaatacatagattgctattttgatgcgctctgatcaattacaagcaaattcttcaagtttttaaacaaattacactccaaattcctacattttgacaaaagtgctttgaaccttaatataaaatgatgatagaattctacttgccaccaatgcatctattaaacagtgtaggtttctaggacccaaatcagattttctttctttgtatcagtttcttgaaactaatgctataatcctgatgtggcttttagacaccaacccattcaatggtggagaattcattcccagggtttgaaagacagctaaccatttctttgtttgtccccagtgcttttaaccaaataatgtagttcttaaaagatgcatttatataaggtagaatactctacatttcctttttatggttgtttaaaaatgtttttaacaaacattacagtaatttttctcatctacctcagaaaagttccatgttctaactgagatgaattcctttgtcaaactagtaagagggtgatttcatttgtagtttacttactaatttattccataatttgagtgttaatcttgctgtcagatgaatataatcaacttttggactcaatttcttcctgtggaggggagaatttctgtgtaccaaattcccacataattgcctcttttgcacacacccacatcttatttttgttggtgcctatcctagcccatcgcaacctgtaattgtccagctaaataatttttttaaaagatttgatgctttcaggtaccaaaatgattcagatttaaagctgcagtggatagtttattgatacatgaattaaacctgaaataccccctcagaaccttaaatctcttttcaggacagatgtctaaagttgaccacagtttttctgtgtgaaagtagatgctaaaattagccattgtagcatgcagctttgtggaagtggctgtactcttgcatcctgtggttctttcttccctattggcatggttattttgatctgaaatgtcctttttcctttgctgtctagctttctgctgtctacctattgccattccatgggccataattctcaggtggaggtttttaaaattttcccttgcctaggctatatcccagaccagctgaatcagaatccctggggacagagcaggggtatttgtgtttttaaaacctcttcaggacattctgatgctcaacctgaattaagaaccacttgcttattgcctaggttagaaatttttatttgttttgttttgttttgtttgacaggatctcactctgtcccccaggctggagtgcagtgacatgatcacagctcactgcagcctcgacctccttggctcaggcaatcctcccacctcagcctccttagtagctgggactacaggcctgtgccaccacactcagcaaattttttagtttttgtgttttgttttgtttttttttaagagatggggtctcactatattgcccaggctggtcttgaactcctgggttcaagcaatcctcctgcctcacactccgaaagtgctgggattatagtcatgagccaccgtgccaggcccaaaaatcttttatttgtaaataactgaaacccaaactatcttaacagcaacaaaacaatttgtcataaggaatcacgagactctcacataacccaacagcatgaaatacaactggacttcataagagaccagagcctggaacaggagcatttacaaggacccaggcaactagtccctgttgcccaggtgtagctctctgtctgcctggctcccttcaggggcttgtggattcagatctctgcttctctctgtacatctgctttctttcttttctctttctcagctagccactttcgctgctgctgagcacatggccaaacatggtgcatcctcattacccacatttgtacgtccttagttcgacttcccagcccagggagactagcatcaatgaatctaaattcctgagagaggatctgatcagtctggcacaggtgatatgtctgcccttaatccaaccagacaacatggcttaaacatggctgccaagggcccacccatgtgtaggttaagattggaggctatttagctatctcaaagtgtatctttatgcttgccatattttttttcttttttgaaggaaattttgtattattttaattatttttatggacagaaaactcaacagtgtacatttaaccgagttcagtggcaaagttctttaacctttgccttttcgagcttgataatgtgagctacagacttgagacccaggacattgcctccccagtgacagtggatctcatcgtatctgtcgtagttggtcctgatagcttccaccagcttagccaaagctcctttgtcttccgagttaacctttgtgaagacaacagtggtgcaggtcttcctgtggactagatgtcccagtcttgccttccccttgataatgcagtaagggaccccctttttacaacacggggcaggcaggcagaagacagccagctcgatgggatcgacatcgtgtgcagtcatcaccagctgagctttcttgttctccaccaaggtggtgaccatgttaactcctgctcgaaggacaggtggtctcttagtggggatgtcccctttgctggtagctttcttcttggcctgggccaacagcctctgcttcttctcttgctttgtctctggcctgtacttgtgggccagcttaagcagctgagtagctgtttggtggtccagggcctgggtgaactggttaatggcaggaggcacttacatccacttacagaggatggctctctgccgctgcaacctgatatagtggggccatttcacaaagcgggtgaggtctctttggggctggatatcctgtccaatgccaaaattcttaagccttttctcaaacaggggattcaccacttccttggcctcctgcttctttatgacagcaggagctggagccattttttctccttggctttctttcctttcagcatcttgggtggcgggaggagagacttatggttgccatatttttcatctagcattataccaaataactttgtttctaatttcagttttattgatgatattttcgcctttaaagaaggtgaaaagcaacaattttcatatatcaggggtgatttaacgttacagatgccactaagatgaacattgaatgtactgttctctctctaagcctagttcttcctcttataaatagggatcagtctaaatgttgagaaaattagagaattgggaaatctgcctctcctaagtagtaaaagttgaaaagtagtacagtaagatagcaatctaatagcacagtcattttctacaatgtatataattttaatcatcacaataaagaatgtttaaagaaattgaggtagtttaatcataggcagtgctgagatgtgaccatataatgatcttttagagagaaggctgctactttttctttgtctacacaagggttaaaaaaagaagaaatgtttttaggaggaatgtaacatagtgcctggcacatggttagtattcaatagtattttactaatagtgtttacttagaaatatttatcagaaataacttcaaggtgtctttggaccgatacaatgagttaccaaggaaagtaaatacatctttccttcttcctttttttaccattaaaggaaaccaaaatacttcaccctcaaatatacttctttgacatatttgagatggctattcagagaacctgcagacaggaatagccctgtaaaactaccttttgtgggggagatttacatctgtagagaaaatctacattgctgaaataaacagccagcctttctgtgctgtgacttgtctggatctaggacagatgggctcctgggagagagggactgagagtttgacacctctggggatctaatagaaacttactcttttggagggctgctacctgtgaggtttcatctgcattacaagactgcctttgctagccatgcttttcttctcttccacccataactggtcttgccagactctaagcctctattccttctgcaacctcaggatgaaaacttcaactatctgaccctttctttgagtttttcttattttttataactcctgtgcacatgcgtgcatattactatttttgtatgccttttttcctattaacctgccttttgtcagttgattttcagtaaacactcagaggttgaaggggaggttttccctaggctcctataccatcttgcatatttgggatatcccaagacatccatgacgcttggctctctaggacattgaaatctggttagggaagtaaaatatgaaagcaatggagaacagtctgcctttggcactcagagatctctagatgttttcacttgtcccatttcatccttataggttaagaagcagggaaatagagttcattacaatttcaaattataattttgctgatattttccccttcagggaaggtgagaagcaagaattttcacatatcaaaggtgattttaccttgaagatgccactaagatgagctgggcagagagaatgttaaggcaaagcacaatgttaatgactaaattagaactgaaaatgaatttaatctctttaaagaacaagaatcaaggtaactgtatttcagtaatgtgtaatgcaaaaaatgcatgatgaataaaatacatcatagaaatatgaagggttgagttatatgcaagtatattataggaaaaattagttgatctgatactgtatcagagtagcttcatcattaaatgacactgtgtcatttatggaatcattggcaattcctagaacatctattacagcactaaagtggtcagggttttcataaagttttgtggaagtctgaaccttattttcttaggtcaaagacatggtagaagcaatttataagtaatgttttattaataaagtgatttctaagtttatgataaatacaagtgacagatccagtggaatttattggctaatgtaattgcgaaggctaagaagtggatctaatgggtttccaacaatgtcatcatcgtttctgctgtaattccatctctctgctctgctttcctcctgttggtttcattcgcagcaggttttgccatatgggaggagcaatgcagcagtctctggtccgtatcacttaggatctcataaggcataaggtcttttttctctccaactttgtcagtacgttcaaaaagagtcctattggcccattagatcttttgtctaccccagtggcaggaagacagggccccagaggtaggggtggagcagttctccaaaggaaaggaaggtttcagttattagaaaaggggtggaaagaatatatgtccaccaatatatcacacaactgcatatagtgcactttcacatcctgtggcaaacaaaaatctttcactaatggaaaggaaatgatggcttgacatattgtgtatagtgtaagaaaaaaaaaatccagatgcttttttcatattcactctaattccctaggttacaactaattagtacttcctgtttgctccccatataatttgcttaccccttgactctatcacgtgtttatcttccttctagaggcctatcttacagaaataggatgtgaacacttgaagacagaactttgtcttttatctctttatttccagtgcctagtccaatccttggaacacagaagccacttgatgcttactgagtggaattaaattctatcctatctactgcttatattaggaaagaaaaaaaatttactagtcaagggcttcagggggaaagtctttgttctctaggaggaaggattttccctaagtcactcttggcctttctgcttcttcactgttcctccttagggaaagtggaatggcttatctaactggtgagtctgagataaggaagcacttcgcacattcagatattgtcctccaccagccatagagggacgggacagggggccctgcctaacccagttttggggaagctcactgttgctatgtacccatgccttctctctctctctttctctctctctccctctctctctctgtctctctctttctaatgaagagtttagctttggagttaatgagcaaaagatttccttaccataaagtgaagcccatcaagtgaaagcaagtagaaaggcgcagaaaggtttatccttgtcaccatgtggaaggacacttaggggagcagatcatttggtaactgttggtacttgtggcctctacatcttgtaaattcatacatgtccacgtttgacctaattgtagacttttttgaaattttcagttttaggtgaaaaccaatgagtacccagagttttctgtctttgttgtcctctggatgttggtcccaaatccactcaggcaacaaatcctggagttacctgctccttatctttaaagtatatgtagcccttggtctccatttctgctgcctttttttttttgcttatttttaaatttaaaattgacaaatacagttgtatgtatttatgggcacaatgtaatgttataattaataaatataatatgggataattaaatcaaactaattaagatatccatcgctccaaataccagttttgtggtaagcacatttgaaatttactctcttaacaattttcaaatgtacagtacataattattcactatactcgccacacaatttgagctccttatatattttggatattaaaccctaatcagatgtatgccttgaaaatattttctctcaatccaaaggttgtcgcttcatgcagttgttttccttgcggtacaggggctttttattttgatataatcccatttttctatttttgcttttgttgcatgaacttttagggtcaggtctaaaatatcattgcccagaataatgttgtgtaattttccccctatctcttttgacagcctacaatcagatatatgagcaaagaaatgatttaaagtttgaacttacatttaaaagggaagcagagtgtaaaattttggataatttgcagcctggctatgtggccagagaaataaaaagcatttttaggagaggaatacaagcaggctgaggaacaaccacttgcttagaaagattagcgtgactaaaagggagccaagtgctaatttccaagacaatggggaaaaggcatatcagagatcttggagacagactctgctatcagacccagagcattatgaggaaataatggtttcagggaccaggcctgggccattgccctgctcaggcttgagacactgctgtctgcatgtgggctgcttcagctccatctccagctccagctcaaagggccccaagtacagcttgggctgctggctctggagggcacaagctgtaagctttagtggctttcatgtggtattaagtctgcaggtgcacagagtgcaaaagtgaaggaaacttcgcagattcccctagatttcagaggatgtattggaaatcctgggtgcccaggcagtagcctgctgcagaggtggagcccttacagagaacctctactagagcagtgtggagaggaaatgtggagttgaagccccccacatagagtcctcaccagggcactgccttgtggagtgatgggaagagggccaccaccctccacgtcccagaatggtagagccatgggcagcttgtatcctgagcttggaaaagctgcagacactcaactccaacccatgagagcagtcatggggtctgcatcctgcaaagccacagggacagcgctgcccatgcaccagtgtgccctggatgtgggacatggagtcaaagatgattattttggagctttaagatttaatgactgccgccgagcgtagtggctcacgcctgtaatcccagcactttgggaggctgaggtgggtggatcacgaggtcaggagatcaagaccatcctggctaacacagtgaaaccccgtctctactaaaagtacaaaaaattagcacggcgtggtggtgggcgcctgtagtcccagctactcgggaagctgaggcaggagaatggcgtgaacctgggaggcggagcttgcagtgagcaaagatcacgccactgcactccagcctgggcgacagagcgagactccgtctcaaaaataaataaataaatagcctgggtgcggtggctcacgcctgtaatcccagcactttaggaggccaaggcaggcagatcacgaggtcaggagttcgagaccagtctggccaacatgatgaaacccagtctctactaaaaatacaaaaaactagccaggcatggtggcgggtgcctgtagtcccagctactcgggaggctgaggcaggagaatggcgtgaacccaggaggcggagcttgcagtgagccgagatcatgccactgcactccagcctgggcaacagtgtaagactcaatctcaaaaaaaaaaaaaaaaaaaaaacaacatttaatgactgcccttctgggtttcagacctgcatgggaactgtagcccctttcttttggccagtttttccctttggaatgggaatatttacccaatgcccatattaccattgtatctcggaaataaataacttgtttttgatcttacaggctcataggtggaaggaactcatctccagatgaaactttggacttcagacttgggacttttgattgagttggaattggaacaaattaagacttgggagaactattgagaaaggatgattatattttgcaatgtgagaaggacatgagatttggggagctagaggcataatgatatagtttagatatttgtcccctccaaatctcatgttaaaatccccagtgttggaggtggggcttggtggaaggtgttctgattatgggggcagatccttcatgaatggcttagtccatccatttggtgatgaatgagttcttgctctggtggttaacatgaaatgtggttatttaaagagtgtggcacctccccccactcttgttcctactctcaacttgtgacatgctagcttcccttcacctgccaccatgactataagcttcctgaggccttaccagaagctgagcagatgccagcaccatgatttctgtagagcctgcagagctgtgagccaattaagctcagcgtcaggtgtttctttctttttttttttttttgagacagagtattgctctgttgcccaggctggagtgcctggaggcatgatctcagctcactgcaacctccacctcctgggttcaagagcgactctcatgcttcagccacccaaggagctgggattacaggagtgtgctaccacgcccagctaatttttgtattttagtggagatggggtttcaccatgttggccaggctggcctcgaactcctgacctcaagtgattcacccaccttggcctccaaaagtgcatgaggcgtgagccactgcgcctgggcagttatttgtttatagtgatgcaagaacagactaacacaaatgggttcagaatgcagttgtggaaaaggtgtataatttaatagtcccctcaaacctcacagaagaatttcagaaagatcctatatttgtttttgaatgcatgcagagaatagattaaaatataaatatcttgatgttttttatattacatatttatatcccatctttttccaaaacagatttaaagtggtttcatctttgacatggtaatctaacccatgacattcaaaagccacaaggacagaaaaagaattttctaagactgcctgaagcgcaacttcatttgatatgatttcctagcctagaatataatcaggaaggcactgatttctttctgttactgttgtttttaagcaaaaaagatcccattcctcctcttctatttctttgcatggtgaatagcttcgctagttacccagccactaaacaacaacctgggaatcaacttcctctctattctgttgccccttcccccaaacaaccactcgatcatcaagatttcttcctcgatttcatgttcagctctacatccagggtctaaattcacaccttggatttctgctgcctgaactaatccagcagtcgcactctgtagcccttcagtccctcttctgtagcatgtccaaagtgttctttctagcagaacaatgtgattgtgttactcttgtacttgaaatccctcaatgtctttttcactgtctctgggatttattccagactccctagcatacatacagggacctcaaggtctggcagctgctcagttctccagccgtatatctctgaatggtttctctctcggcctcatttctccatcacccctcctcccagtaaacacatacactagaaccattgtgaatttctcagagtacttcttatggtctaggatagtttacatttttgggtcccttttgctgctcctctgcctataatttatcccttcccctcttgccttccctctaccccccaaggctggctcagcttttaagactcaatcgaagtgccaccacctctctgaagcctttttcacacttcacccttaggaagaatgaagcatcttcttcctcttcttcccttccatgtctataatcctcaacacattttttttttcatgaattgtctgcaacactgtttgctttcgctagactgaaagatcttagggacaaagtccaagttatgctccttctgctgtctctaatatctagcatcattcctgacactttagcagtatttcataaatgtttattgactaaatgcatatttacctatgcatgaaagagtaacagtttcagagtttttgttagctgcattcctttacttcctatcagtttggggaagtagatttagtatccacaaaatgattgggggtcccctgtactgcaaagatttgactttaagaagtaggtggctgggtacgatagctcatgcttataatcccaacatattgggaggccaaggcagaaggatcgcttaagcccaggagtttgagaccagcctgagcgacgtagtagggacccattccgtatgaaaaaccatatatattagccaggcatggtggcgtgtgcctcccaaattggctgaagcaggaggattgcttgagcctgggaggtcaaggctgtagtgagccatgattgtgccactgcacgccagcctggatgacagagcgagaccctgtctcaaaataataataataaataaagaaacaggcccgtgaacagcatcagcagtttcagctactaatactagcagtctttgttcctcttagagtgcagagagctgctggtcacttttgatctttattaaaacacccatacacagtaagattgcttgggaatccaaggcagaatatatctgtgtggtttgagagaggactttaaagtgttagagagtctaatcttagagcacactaaaaagagagtagatacactaccccagggcagagatgaaataatgaatttgctgaatattccatgtgggccctgaacatcaacagggcaagagagaagtcaagaaatgaaaagtgctggtaaggtcagcaagtacctatcttggcacccaatggtaccaagtgaccattgcatggaccatgctctgggagggcatgagaaaaattaagggcaaaggacattccctcaaagagtttaccagtttaaagctttaatgtcactgaaactaatatgtcttctgtgacaagctttgatgataaatgtagactaagttttttaaaatcatataaaaatttaaaatactttgcaaagcacaaacaattttcttaggcctgccttggtagcaagaacagtttgtaatgactaaaaagtgaagaatctatggtatattcatggtctaaatcagatattgcaagctggtgccctctggactggagtcatacgatattttcaaattcaggaaattttaaataaaaattaagatttcttacttgtgatttccttgtgctctcaggttaaaatggtttatgcaagacttgatggtttgaaataaaattggctaaatggattctagtataaatgcaaaggatatttaactcacttgagagctcataggcataatgcatatgtttgtttaaaaacaaaagaagcaattgaagattaacattgactttgtctcgcctggcgcggtggctcacgcctgtaatcccagcactttgggaggccgaggtgggcggatcatgaggtcaggagattgagaccatcctggctaacagggtgaaaccccgtctctactaaaatacaaaaaaattaaccaggcatggtggggggcgcctgtagtcccagctgctcaggaggctgaggcaggagaatggcatgaacccgggaggcagagctttcagtgagccaagatcctgccactgcactccagcctgggcgatactgactttgtctcatagtttagatctgggataaacaaaccttttctgtaaagggccagaatattttaggcctttatttattttaggttttgcaggtcctataatctctgttgcagctaaacagctctgccactgtagtgtgaagtcaccatagatgatacctggacaaatgagcatggctgtgttcaataaaactttgtttatgaacactgaaatttgaaatttatataatttctacatgtcacaaaattttttttgtctttttttcagctatttaaaactgtaataactattctgagctcatgggccatataaaaacaagagatggacctcatttgacatataggccaaatggacattggctgagtgtcattgtaaaatcttggtcttaggctttttagacctgattagcctaaaaggaacaaactagaatgttctgttctctttacagggcaaaggaattctcctttccctactttttattttttattttttcattttttttggatggagtcttactctgtcacccaggctggagtgcagtggcaccatcttggctcactgcaacctccgcctcccaggttcaagcaattcttctgcctcaccctctctagaagctgggattgcaggttcgtgcccgacgcccagctaatttctgtattttcagtagagatgggttttcaccatgttggccaggctggtctcgaactccagacctcaggtgatccacccacctcggcctcccaaagtgctgggattacaggcatgagccaccatgcctggcttccctacttttttatatccatggggagcttggttgatatcctgcttgaacatggaagacccaagttgctcaccctgtgttttccaaagccttaaaggctagtctacatttcagacagcccaggtgatgagggagccttgtgttttctgtgaggaaccttatcccttaagcatctatatcccagtcatacttatgcatggaaaggctaagtaaaatctattaatatcctagctagaaagaaaactataaaattacacatagatgcaagcttgtgtgtattctgcagttcaaagtgtagtcagcaaaaaaagcatacacgctatcgcactgggaggaaatcggtgtctttgaaatcaaataccctgccattggcatatccaggcttgaaactcagctgcagcttttagcttccaccacatgtttacattggaaatctctctgtgcacatatagagtttgttctcttatgaaatcatgtctctagggaaggataatttaaagccatttccgtttgttatgtctgagctgaactagactattagggcttgttaacgctggataaacttgagccctataactgccttcatctgcagattatagaatctgtccaacaaattgcattctgatgttttcagaatgatggctaagcaagcaagggccttttaatttatattctatcaccatggttgtcaggaatcacagttttgactttcatgcttacttggtatagcagcgatgatatgactcttgaatggaccaaatccagaagtaattgagacactaaactgcatctgcatgttactatagcagagtgagcaaaggctgacagtcagaaaattgctggtgaagcatctttcttcagagtgcctcccttccccgagtcttagcataaatcagtgttaggtccactgaaatatcgtgtgtggtctgcatttagaaattttatttgaaaatgagacagatggataaatgaaaacaagttttctttaggctagtgttaagtaaatagaattaagtgaagatagacagtttccctgatttagtggaggggagatggtggttgccccaggatatctaactccctctgcctctattcatcaaatccactgaacacatttgccttcagtttggcttaatatcattcaccattttagatagtgggatactggaaggtagaaattacatctgtttgacttcttttgtgaaccagtgtagcagaactaccagtacaacttaagtaaaatcacaaataggatggcaccaggcaatagtgtgactatccaacatggcatcccctagctgggaaaggaatcctttcttcatggctctggccttattttcagtagctccactgaattcacttcttttcaataaacttgtagaaggtactgccctacgccctgaggttggggacagtggcagtggtaggatacagagacaagtaagacatagaccctgcccaaaaggtgactgtatacataaagcaccctaatccagaccagactcaaagaatgctagaaatgaagggcagacataggacagtggcattttgagtaagaaatagggtttcaactggtgggagaaagaagaacctgctagactaagggaacagcatgaactaaagaccagaagtagaaaagtactactttttgtaccaaaagtagaaaagaccaaaagtgttgagggagaatgggaataattcctctctctctctttccttttttccctttattctttattcaataattatttgatgaatgtttatggtaaaccgaacagacacagctcctgcccacacaaagcttacagtctagaggaggaacaaccaggaatcaaagaagcccaaagtaaataacaaattacagccctgacccttacctcaaaggagaggggtacattgactaagagagcgcattacaggagagtggaacatactttacaagcctttactggagagatgtcctgccacctgaagagagaggaggcattgattagaggagagcgctctatggagaggagtcagcgtggacactgagactgcaagagtgagggaatgtgcgggattagaccacagtcagggagcagaacacagtggggtttttggtctttattctaagagcaaagaaaagctattgacctgtttctagcaaaagatggggtaaggtaatgagatttgctagttggaaagatcccactagctgcagtgtagagaatgaattagatgggtgaagagggacccctgccaggaggcagatgcaattgtccatgggggatattctggtttctttgcactggagtaatgaggatggggatgaaaagaagggaatatgtttaagagctgataatgagcttggccttggcaacactgagtttgatgcacctttgagatactaaggagacataccaggaagatataggtgtactggagctcactgaagaggtctgggctggagataaacaattgagtcatctccttataggtgataattgagccataaaagtggataaataaatataagttgaatgaatgatagaattaatgaatagatggtattgggtgaggaaagagcacagagtaacgagggcttaaacaacgttgtggtgctgtatttctgtaactattacttatcagttgtgagactggacaaagtgattttcctctggccaggtctgatgcctcctatggacacattctgaaagccagcaggaacctagaaagtgaccaggccacccccttgcccacatagaaacatgtctgctaactcttccaccttaccaataggtggattccaagagttcacataaaaggtggttgtttggattgtagaagtctcttcccaaaagaaactcctactttcctagggagatgccaccatagaccctaattaaccaaggtcctttctgtgagacattatgttcaataggaccttgaggtgttacaaactatttcctcacagatgcctgggcataggcctggactcttccccagaatcctcccatcccacttgccaggcactgagaaacaggactttccacttgtttgtcactggcaaggacttcatggcttcagagagggagctccaggggtttctgggacacttaccagtataaattccctgaggttcttctaagtctgtgcttgaattcattcattcattcccttcttatcttttctgaggaccccaagaattggcctgcctgtgtcctttgcttttacttgcagcaggtgggggtctggcacggtcgggggaagggttttgatgggaaaagtgaggctggtactatttttcctcccatgtttagcctatagagtatagtcataaaacttttcctcaatgtttcagtcctgaagcaagcgcacagctcattggaagtttctaaggatttttattattagcaatgtcagaaagcaagttgaaagcaaaacagccccctctgggcctcttccctagcctttccttattttgtgttgctttcctcacacccaggaggaacacatatcccaattcctgaggacagtcctgatttgcaactggcatcgtggcacaactgccaatagtaccacctttaaaaagtttagacactgaattatggtcatgctacttaaccccataaagaaaaataaagtaatgcattgggggtaatagtggatttacaaaagactacaataatctcgatctgcattttagcgagaggatatgagccacagagtgatttctttggtattttgtcccaacagctggactgggcctctatgtgtgtaggtgagggatggggtacagagaggaggacttgtgggaagtgctggaatatcagggctagaatattgccacagaaatgtgtctattttttctcctgtctctttctcagtaaccagatctaccttggaagactcagactggcactttggcaaggtgagatgaaaaatcagggctgaggaaggtgcatttgcaggcactgtggggtccacagcagagaggataaaaacgtggaggcagaggtgcatccgagtcataatagcacagagccgggcgttggggttggggcctgagccattgttgtctggctgtcgcagcagggggaaaggaggacagaagtgtcaatgtttcgtttagaatttttctaaaaagttgccactttgggtgaagggctcagtaagaccttcccctccacactccacataactatgcttctattagaagtattctgagcagttcaggccttccacgtggtggaactgtgtggggtaccctcaagcccatgggtctctaggggttgtgcctaagtcacatgtatacgttccacctgtgatgttaggcaagcaagcatatgatcctttctcatcaccacttccatgaaacaaagacattttagaactgttgacgatagcaatgttttctcgacaaagagattacttgtaaagtagtaaagaacattagaaaaaggagctatagtcatatggtcactgttctttgtggtgctatataggtggtgtgtatattataagaacttttgtgtcttccaataatgttttttggtttttggttttttggtttttttttttttttttttgagatggagtctcgctctgttgccagtctggagtgcaagggcacgatttcggctcacggcaaccttcacctcccaggttcaagcgattttcctgcctcagcctccagagtagctgggactacaggcacacaccaccacgcccagctaatttttactgttagtagagacgaggtttcaccatgttagccaggatggtctcgatcccttgacctcgtgatctacccacctcagcctcccaaagtgttgggattacaggcgtgagccaccgcgcctggccccaataatgttttaaacgagtaaaatgaagtttgtcacttctgcatgcttacaagcttaaacatcaaaagaattggccaggtgtggtggctcacacctgtaatcccagaactttaggagacgaagttgggaggatcacttgagtctgggagtccaagaccagcctgggcaacaaagcaaaatctgtctctacaaaagatttattttttaattttttttttttaattattaagaatccaaagagtttatacatttaggtgggaaaggtaacccttgggaagccctgggctagcctctcggcttgctcatgattcaagtagcaaaaagaagtagtggactcaggacagaattttgacgtgggagccccatttcaagctctgaggtctgaaatgccaagtttaagcctcttggcctcattgtgactcgatttccctttctgtgaaatgagaagataatcccagtattagggtactatccgagtaccttcaggctttttaggaagaactctagtgagtaagctctctggctgtagaggggaccgtgatgcacagtaaaaagaaccccatcttgtcactggagggatataggcagccgcccaatgggagctcccatactgtagagatggcactcttgctttggtgggactagtacagatgtattttttatgtcccatttcttatgttgcctattttttggagacatatttgtttgttaactctttgagtttcataaagaaaacattaatacaaattttattgagtggtaggttagctccaatatcctcaaaatagattgagcattttagaattcaccttaatgttacctggaatgcaaaaagatttgcctaaaacgtttagctcctcattttgttactggcttcattctgattttggaaacaacagaaagtaaagtggaactggggttttgggtctattagattctccaatttaatctcgcccatctattcctgatattaataaactctttctaatatcagttggccatggttgtcattctggtaaatacctccctggaaccggactgaataaaattcatgagacttgctggtcacagctggagattggttcagtggtttgggtttttttttctaccaaagtgaaaatagaattattgttattattgttttctagttttaaaatgactaaaagtacaaaggaaaaatggaaaagtcaatttaaatcctactgctgagagaaataacattttggtgagcaactctccagatcactctcagaatgtgcatattatacttccatgtgccattgttagaaaacaagagtgtactttctcattgtggacaactctatgtccataaataatgacaccattaattatagtgacagtatataatattccattaaacagctgtgctattatccatttatgcatttcccaattattattcatttaggtttttttatattgcttactatcatttaaaaattgcagtaaacattcttttacatccagatttccaaatttgtctaattatctcccaggttatatagccatatcttgaggatattgtagacatggttccagaccattgcaataaagtaaatattgcaataaagtgaaatacattttttggtttcccagtgcatataaaagttatgttggccgggcgcggtggctcacgcctgtaatcccagcactttgggaggccgaggtgggcggatcacaaggtcaggagatcgagactatcctggctaacagggtgaaaccccgtctctactaaataaatacaaaaaaattagccgggtgcagtggcgggcgcctgtggtcccagctactccggaggctgaggcgggagaatggcgtgaacccaggaggcggagcttgcagtgagccgaggttgtgtcactgcactccaacctgggcgacagagcgagactccgtctcaaaaaaaaaaaaaaaaaaagttatgtttacactctactctattaaaagtgcaatagtattatattttttaaaaacaatatagattacctaaatttaaaatacttaattgctaaaaaaaaaatgctagggatcatcggagccttcagtgagttataatcttgctggtgaagggtcttgccttagtgttgaaggttgctgactgttcagggggtggttgctgaaggttggagtggctgtagcaatttcttaaaaaatgacaataggccgggcgcggtggctcacgcctgtaatcccagcactttgggaggccgaggtgggcggatcacaaggtcaggagatcgagaccatcctggctaacagggtgaaaccccgtctctactaaataaatacaaaaaaattagccgggtgcagtggcgggcgcctgtggtcccagctactccggaggctgaggcgggagaatggcgtgaacccaggaggcggagcttgcagtgagccgaggttgtgtcactgcactccaacctgggcgacagagcgagactccgtctcaaaaaaaaaaaaaaaaaaagttatgtttacactctactctattaaaagtgcaatagtattatattttttaaaaacaatatagattacctaaatttaaaatacttaattgctaaaaaaaaaatgctagggatcatcggagccttcagtgagttataatcttgctggtgaagggtcttgccttagtgttgaaggttgctgactgttcagggggtggttgctgaaggttggagtggctgtagcaatttcttaaaaaatgacaataggccgggcgcggtggctcacgcctgtaatcccagcactttgggaggccgaggcgggcggatcacgaggtcaggagatcgagaccatcccggctaaaacggtgaaaccccgtctctactaaaaatacaaaaaaaattagccgggcgcggtggcgggcgcctgtagtcccagctacttgggaggctgaggcaggagaatggcatgaacccgggaggcggagcttgcagtgagccgagatcccgccactgcactccagcctgggcgacagagcgagactccgtctcaaaaaaaaaaaaaaaaaaaaatgacaataatgaagtttgccttatggattgactcttatgaaagattgctctgtagcatgtcatgctgtttgataacattttatccacggtagaacttctttcaaaattggagtcagtcctttcaaaccctgccactgctttgtcaactaagtttctgtgatattctaaatcccttgttgtcatttcaacattgttcatagcatcctcaccagtagattccatctcaagagaccactttctttgcttatccaaaagaagcaactcctcatcatgttttgtcatgagattgcagcaattcagtcacatattcgggctccatttctaattctaattctcttgctatttccgccacatctgcagtaacttcttccaatgaagtcttgaacccctcaaagtcattcatgaaggttagaatcttattccaagctcctattaaggatggtattttgacctcctcctatgaatcacgaatcttctgaatggcatctagaatgctgaatcctttctagaagattttcaacttactttgcccagatccataagaggaatcactatctatggcagctatagccttacaaattgtatttcttaaataataagtcttaaaagtcaaaattactccttgatccatgggccgcagcaggcatgaaaacaacattaaccttgtacatcttcatcagagctcttcagtgaccagctacattgtcagtgagtagtactattttgaaagagatctctttttttctgagcagtaagtctcaatggtgggcttaaaatattcagtaaaccatgctacaaacagatgtgctgccatccattccttgttgttccatttctagagcacagacagccattttcaacatgccttcctcactaagcttaatcatttctagctttaaagtgagagatatgtgactcttcctttcacttgaacacttagaggccattgtagggttaattggcctaatttcaatgttcttggcctaatttcaatgttgtcctgtctcaggaaatagagaggcctgagaagaggaaaagatggggaagggctggttgttggaaagtcagaatacacacatttattaagtttgctgtcttacagaggtgtggttgatggtgcccaaaacaattacaagagtaacataaaagatcactgatcatagatcaccataacagatataattataatgaaaaagtctgaaatagtgcgagaatgaccaaaacatgacacagacatgaagcaagcacatgctgttggaaaaagggtgttgaaagacttgtcaacgcgcttgccacaaacgttcaatttgtagaaaaacatagcatctgcaaagtgcaatacagcaacacacaataaagctagacatgcctgtactcctgaagtgatgttgatgatcgatgggtccgaggcatgtttcagtttttgtatgtattgcaaaactacctgtcaggaatgtatcagtttgcatgaccatcagcagtgtttgtgaattattggtcccccacactattgcctacactgcagctaattttttttctcaatctttgtgagtctcttgagtgaaacaatatcttactgtcatttatgtttgctttactttgattactagtgagatgaagcatctttttgtatgtttattgcccacttgtatagtatttctcctattatgaaacagaataggtcctgtccaaaaactctaggaaggttatggtctggttggtccatggaatgtaggatctggactgtaaattattcttcagtcagatcgtgtgatataaaagcctatatcacacaatgtgtgatggtaaagaaattattaaaaattatttgaaaaatattttaagaatagcttgttttatgattatatcatggagtttgagtatccttaacaaaggaagaaattcaccatgcttattggagacatgtaatcctagagaaggtgggactgggccatgcccctctgctgcagtaccagcacagaatgacagaattgttggaaacctctcctaattcataccaccccacagaggagcagctgccacagtggagcacaccccacctgcttggaggtgccataggccagcctctctgagttttatgatgcatctgaaatggagttttactgcatcctcccacgaccttacgaaaaaccacgggggaggaaagaaaaacagaacccaccaagaggagcaagcagacctgtccgagggtggggaattggctactccataaggcagcaggagagtaaactacaaaagacataaagcacaccttgctttaatcccttccatccgcccagagcccccagaaagctcataaagtctccctttctgggtgattggattcctttagctcaggggcaagtagggcatttttttggttttgttttggaagagggctgggtaaaggagaatggtaatcactggggttggaggagggagaatgaaaacgggggcaatcactggggttgggggagtcccttctcttcttgcttcgaggtagtgagtgggaaacgcaaacagctgctgcctgaaatcacagcgcgtgggtactgggcagccagaccagatcagcagccattaagcagggcccacagttcctatggccgttacctctctcagaagccaggcagagctgtgagttctttcaccttttgagggctcctcttggctacctcaaaggaatcatttggaatgctgctggcaaaaacgttgctgaaagttgtgtgttgtaggggggcagtgttttttctctctctaaaaagagtggtggtggttctttgccaggatttagaagccagaactgtctgtcctttttgtttgaaatagagactttagagactagtcttttcgtttactgaaagaaggagaaagaaaggaaaaaaaatttgtctactttgcctttggtctgggtactttccacttgtttgcttttaacctttctcagtgtttgcagggtgcagggaaacggccttgtcagcctgggctgggctccttaagtcttgaacaacaaacacttaaaataatcaaaatgttatatttggcagttaaaagaagaatctcctaaaactatgtctagtcttatttgtttctgaactcctggtagaggcggggagaccatgttctccattctgtggcctagccactcttccgggccttctcttgttcctcttcactccctcttccccagatgtactcctagactgagctgcttcccagctcagagcccaccacgtgcctctgcagcttctgtgcctttgcagatgccgctccctctcctggaatgccttctccccacccttccctggctgaagtcctcctggccataaaaggctaccctaagtgcactgagcttccttgctaggcacatcttatcatcgttatttctgtaattcttcctttcattggctgacatccatgacatcagggcccaaccttaggtggctagcacaatgcctgtggcagtagtggcagcagtagtcttcgtgttaccagcagcagcagtaatgactcttactgggcatgtgccatgtactaggtctttttcatactcatctctaatcctcccaacaactctacatcgtatatgatattgtctcctttttagagatgaggaaattgggacttaggtggggtggaaagatgtgatacctttcctcactcatcatgagggtcacagctgacacccctttaacaaaagacaggttgatgataaaagcataacaaatgtatttcatcaaagttttacatgacaagggagtcttcagaaatgtagacccaaaggcccagggaagatggtctgtttctatgctttggtctgaggaagaatgggcagctgtgtagaaatgtgattggacaaaaaagggtctgatctaatgatgacagactgagggggtagacagagcaaggcctgtctgttcagattcttcttggcctccctatagcattccttcctccaggtagggggtaggacccctctgaaatgaagggttttagggagaagggagagaatgacctttctaggttttatggattgctttgggagagaggggttctagattctatgacctgtcttgaggaagaggaattctggtttctgtgattccctttaggggagatgggagacaaggagggcaggagaaggtcagagaaagactttgcttctgaggcagctctgaggctacccaatatcctttagttcagagtactcagcctgccaaagcaccatagtttgggatactgttttctgcgccctggcacttacaagttaagcaactcacccagggtcatagagctaacaaatggttggaccaaagttagaagccaggtcttactcatttccaccctgtttcaaggactctgattagatgctcaataagtacctactgagtgaatgagcggccttgaaattgttttctgaggctggggaactcttgccaggaatttcaagagccactgcttttacacttggccacttaactttgctccctagagctttagtttctcttcttctacacccaatatcatcatgtctactgttttcttcctgagtcatatcctctcattatgttttagctatggcgggtaaggatggagaaaggggagagtctcctggtgcttgtttcatgtatcttattcccttgacctggtccttgttcccttgaagtcttttgtttgtctgtttgtttttgagacagggtctcactctgtcacccaggctggagtatggcggcacgatctcagctcactgcaacctccatgtcccaggttcgagagattcttctgcctcagcctcccgagtagctgggattacaggcacctgccaccacattcagctaatttttgtatttttagtagagatagggttttaccatgttagccaggctggtctcaaactcctgacctcaagcgatcctcccacctcagcctcccaaagtgctaggattacaggcatgaaccactgcacctggccccttgaagtctttatagtcgccccaaagaaattaggctaaacttaagaagtcactgcttctgtagatctaaggtggctgaatatcggccacagcatacagttcaaactaatgcagtgtatctattaaaggttataagaagatacctacaaacttccctcatgggattgttgtgagaattaaatacatataatacatataaaggacctctagtgcctaacacattgtgagctctcaaaaaaatataaatgttagctcttgtcattatttttgttaatccttgactggggtactaaaattcctaaaagagagtaagccaagaaaaatatgttaattattacagcaactaatatttattactatgcatcaagccatttttgtaaggatttttcatatattaattcattattaactaattttcatagcaatctgatgatgtaagtgttagccccattttacagataagaaggtgaggacagagaggcgaagttggggagcttgggatcaagtttctggttctagaacctacgttctttcataaccatcactgctctgaaaaagagtaagcaccagacctgaaagaaacataacagaggccgggcgcagtggctcacacctgtaatcccaacactttgggaggccaaggtgggcggatcacgagatcaggagatcgagaccatcctggctaacagggtgaaaccccgtctctactaaaaatacaaaaaattagccgggcatggtggtgggcgcctgtagtcccagctactcaggaggctgaggcaagagaattgcttgaacccaggaggcagaggttgcagtgagctgagattgcgccgctgcactccagcctgggtgacagagtgagattccgtctcaaaaaaaaaattaaaaaaaaaaagaaacgaacagaaatgttgttagctccttctcacttttatctctagtttgaatgagtgtgtttgtgaaaggcaaatgcctctggggttcttgcacagtcctgggcaccactgggaggagagagggcaacctagagacatttgtgttcctggtaaacaactgaaaataggcggagcctttgtgcactgaacccagctactttcaaatcgcagtacttcccaattgcaaacttggtgcaaaaaaacctacattgccacagttgagactttcatgaggaaagattttgggtacaagatagtttttcataccgctttgcttacccctgagactgcaaagtaccatgtctccttgttttatagaagccaaaacaaattctatcgataaacagaatttttgaaactctggtattttcagaaatttgtactgtgcataaagtaatggtttggtgaattaacataggtgattaaacaataaagtgatgcatacccatttccatagaaaatatatgcatatataaaaggaattttacagataaactgtatgatatatctgttaatatatcatgttttattttcagtgtttttgtgtattctcagtgtccgccagtatggagacaggctcatctccaggtgtgcaggctctgagtgaagggggcctcctcattggagtgtgcaggggcctcctcattggagtgtgcagggctctcctgcggcggcgcccactctgtgtccttcttccctgtttttgtttgccaccttgtggttaacatagctctgtggctcaaggaggagggttgggccggtatcatctctgaaggtaaaatgcatacatgcgatgctgtaacacagtctttctcccggcggggagtgggagtgtgtgtgcacacgcgtgtgtgggtgcagtgaaggtggagttgcccacttagtgagactcagagtctaccctcaaccactgtgcttctgtgtgctcccgtgtaggctggaagtcgtatcagccgctccattgcacagagattgcagagaaggggccacatcggtcagtgttagcgtccacaggaggaagttgtgtggtgggaaggccgcttctggctggactgcaggcttgtttgcccacacgcgccccagtgagagcgaggcctccacgggcttccttctccagtgcggggagtgtgtggcgaaggaagtatctgctgctgagctcagctttgcttcgccatgttccttcccgatccgctcatcctaaccctctctccttccgcctccatcctccctgctctccgattgccccagtgtgtgtgtccccttccccagccacccctctgatccctgactaccctcttctccctccctccctctgcgcccactcctcatcgcgggcctcaggggagccctgtctccactcaagacacccgtgaaacagagggagacactagcagtcagcgggcactttgtggggagggccaatttagaggacagattgaccagggcgagcagcaggatatctagaaagacgctttgcttctaaggagcgggagcctaatcccgttacaggctggagggagactcctggggccggcaagcctccttcccgctgtgcctggagggatatcattggaggaccgccgggcgcggtggagggctccactcgccagcagccccctcccccagccccttccactctcttttcttttgcagtgacacatactgcagtgcctctgaggtcatttgtttcccacagcctcacagggcgctgtggcaacaagggggacaatgatctctcacaggaatgatgggaggccttgttttgccttaaataagccccttcaagggagcagtaaggtctgttgtgtgtgtggtttgttttttcagaaaatcctcttgcacgtagttccagtgtgaagtactctggcaacttcaattgaagacataaagaatcttatgtgtgtgtgtgagggtttaattttatttttattgctgctttgagaccaggattgtgttttcccttctgccagttacccttttcccgctcaagctccctggacctccgcattctttcaatagttttagggcaggaattggcaggtgttaggggcagagagacgcccatgtctgggtgctggcttctgactgcccttagctttggtgagggagtgaaggttagcgtggcaggaatgtagtgctcctacacatttctcatcctatcctgggtctgaggaaagcacagggcactgggtggctagggctgggattcacaacaaagtgacagtggaggctgagggagacgtactttatgggccacctcggaatagatcatcagctttaacgccagagcttcagaggcatgtgcagaaagaaaaaggcctgtaagtagaataaagaggaggcaggttctgtgtctgattcggctgtccggtgaggaaagatgtgaagtgatctctacccacaccctggtaacaccactggaagacaaagaactgtcctgtttgtcttactgctctgtcctgtgttttaaagtcttcaagctgctgaaggcagtcccacctcagagcttacatgcgtaaacattattatctgtaaaggcttcctatttgatgaatcatggtgtatcatacaatctagatatttcatctggagaaactgagatgaggcagattaaagtcttttccaaaaccacatgaggaattaatttcaaagcttgagattaaaacctacatcttgtagtttcagattattaacttaccagtgtgatctacaagttctttctccatgttctaaaaaacaaattttttaaggcaatcaagacattttcattctctcatgtgagcagtatgtatcagaaaaattcatctgtataaactgtatggcagtctaaattatatttttaacctgtcttttctttttttactttttataaatcatatcttccactgtttacaaattttgttatgtctttcacatatcagactcaaaaacagttggctttatgattgggccactagaagaaatataatattttttcacttaccttttcatttcctgacttttttttagtgataatctgaatatatttgtgaaatatttaggcaggaaggtgagttttccagatgtttctgttgattattgcaaacacagagcaattcaaagactagtgtcgctttttgataaattaaaaatactttttttgataactagttattcttgactttaataaacattcctaagattaactcttcccttaacaactttagtgtaattttaatttttcacaaatcctgaagtgggagtactggaattttggagaaataaattaacatgttgccttatttctctggaccatctgttaatgcttattctcaactaaagtactgttcatcagcttcaagtaacaaacataccatagacaaatagcctatgtctgtgacggtgataagacattggccaaatcatcctctctctgaccatgacaaaagtgtaccagtcgtagctaaagcaagactgaatctatttggtattcattgtaaaggaaacaacaacaacaaaaataactaataaaggtctgagacaagatgatggatggcaaaagaaccccctatggtcataaataagctaactttggaaatgtttgacttaaggaagtacagactatgcttagtctgcctcgtgtccctggactaaagcagccttgaaggctcatctgaacatttccccaggggtttcttgcctattgacaaatcccaccacatcttccagatgcacagaagaaagttccgttaaatccaaaatggtaaccaaaaatgttgaatagcaagaaactggcaggggtggctttgggaactggtaaataaataacaggcttgttgtcccacaccctagtttaatgctctcaagaggttcttatgttgctcgcattagtgggcatgtaaatgaaacccctgttggccttggcagatattggcctcttccgtgaccttgtttgactgaaacaaaaagtcattggtggaacaaaaattcagagctctgaacttggttgaaagaaaagggcaattctctgaattgggtaattggatcaccctcccaagtgccctagggcttatatcaaacatataagaaggggattaataacttcagtgtataaatgagcttcaggcagcttccaactgtaacatttcactctcaggagctttaggacataacagatttttttcagagcattttgaagtgctctttataaaatgcaggaagggactacagactactgtggaatctttgtaattgtacatggtccagtctgacaggcaggcaacccgaaagcctcttcaaaatggccacttaataaaactgttcatgaaatataccattttgggactgaaagatgatgacagtgatatgttttcaaactgtacttgatattcccttccttagtcataattttatgatctagactaaattacatgtatcattgagtgtgaggattccaagacttgagacagacttacgtatttatgtgtgagttgtaagggaccattggaaaagctgagaattttaaaattcatttatattaattaatttgttcactcagtatttattcaatgcctactatatatcagacttgaggatataaaaaagtataaagtagagcaaggctgacagacatttgaaaggcaggttcatgaggattgaaggaacatgtgggaagggagccattacttcttaggagtggggaaaatccagaggagactagaggagataacgagagatgagtcgacagcacaggaaaataaagaagagtattccaggcggaggatacaacacttgaaatagttacccagaaaagctggcctggtgattaatcggcccagataaaagaggtaggctaacactgttattcgtcttttaaaggagaaggatcaagaagcagttctgttgggtcctgaggaagtgggattattagtgatggacacaaagtgctggtgtcacagctgtggtagaaaaagggaaacaagagaaagcttctgaaaaaaatgttttgacaactatttttatggctgtggacatcctgagacctctgacaatcacatagaaaagagagcccatagggaacattttagaattgattcttatcttaatagctatctttttggcctgtctggttgccaaaaagaattagcagaattctgctgtttatgtattgctgaatcagtttacaggtgatgttttattactagggaaatattgctaaagctaggtagaggtgcttctaagaactaaagcaccagaaacctaattgggaaaggaattaactttagtcatgtacatattttcatttttctcctttaatttttatattaacagaaaccctgtgaggcaggtgttttacctacattttcacaaatgagcacacagcctcgaacaagttaattcctcagaatcccacagccagtgcatgctaaggcccaagtccccttcatcctccattctcccaccggtcatagctaagtcttcaagctaatgttcacctgccagagtaaaggcagaatatttgaattctcttgtatttgttttagtttagttattgactatgtttttcttcctataaagtaaatatgtttcattctttctgcacaggttttcctataatgcctgggtgcttctagctagagagggcaaattgatttcatcttccattcaactccagaaggtctatagtggccgcttggactgctgtaatggagttgctcagcagccgctcccatatgctctatgatggggcagtggtggtacaagtgctgcatccctgctaccgaggctgctgctttagtatctttacttcactcttaaagtggggaatgagagaaattgtctaaagtcctaacacaagacagccatacctacttcccaaagtagtaaacactctgctgctgcatgtagaatgaaatagagcagtgaaattataaaggagatttgcagtctaataattgggagggaaaatgaagtataaggctaaatgaagtagactacaaacacctgaagcatgactacaaaatcaagttgacattttgtggctcattttcagggtagctgccggaatctggttatggtcgttgtttttattttttagggttttcccccatctgtgtacagtgagatagcaaccacaaaaaaactaacagccttcctgagtctcttggctgtagagtacccagctcttttccctgaagcttgccctgaagaggcctggtgatacatccctcttgggagatgtgacatggttccatattgacattacccactgggctcattgcttgagtctcaaggttgtttatgtatttgatgtttcatttaaaaataaaagttacttacggcaaaaatagcctagtgccagtgggtttggctattgtaaaatttagaaacccatttaggaaaccaccatcaggatcttgttggtgctgtatcagcttgggcatattgcccttcagcacaccggctcttgcacagattgcgtccactgagttgaattatggaaaccttccgtgagaaaatgagagcactcaggaagtagtattggtgatccacaaagcattgctgtgtcctctaaggttctttcctggtctcataccatggtttcttcctgggtaaaaagtgaaactggggttctgcctttctcaagggaaaacgtgtttgctgcttggctttggaattttggggcaactcagtcagtgacatttctctttcacaaactcctcctgttctttcaaataggtgccatatctttcactttccctatcgatacttcatatgttatgcctggctgctaggtttcattccagagcctcttgtgtttaagtaatgaatggactaatcataatgactagctcagtacaggttgctgagttggagaccatggcctagtcatttctctgatcacacagaagtcatttctggacaaaaagtgctacatactatatatctatatctgtctatatatttttttcttgatctttcttctattttgtgctgcaaaaacaaacttcgaggggatgattctctcacaggatatggaaatggccttggacaatgtccagggttagtggcacagctgctgtttcctgcaagggacatctcaaatccagaagggaaaaaagacaaagttaaatatatagcaggaggataatgactgaacctattaacccatttatgcctagtgttccattagtggaacactaagcttgtgggagttatttatatcctcatgcttaagctcatcaccaaggtctgatttttcacataaaaattttgcaacctctggcataaatgggttaacaagaaggaagggatttgcctgttacaagatctgtctgtaatcacatatagccattggcagaaattacagtttacatttagaagacatgtttaaaactctttaccaaagggcaactgatccaataataatgatagcaacaacaataacatctatttatggcacctaataattttaaagttcctttgtgtacgtagttttatattcacaacaacctagtaaggcctgtaagttgactggagagggctagggtatgtaaaactaggtaaagaacttggattttatcctaagcataatgcaaagttttcagccagggatggacatgacttgactgacagtttaggaagattacttggcctgctctgtaggagtatagactgtaagggggccacatgaaagccaggagacaagtcagcaaacataacactaatccaggagagagattatggtggctcagactggggggtgtggtataggggatggcaagtggtcagattcaagataaatatgaagacattccttacaaaatctgcaaacagattgaatgtgaagtgtattttaaaaaatgaagaattggccgggcgcagtggctcatgcctgtaatcccagcactttgggaggctgaggcgagcagatcacgaggtcaggagttcgacccaatatggtgaaaccccatctctactaaaaatacaaaaaaaaattagccggacgtggtggcacacacctgtagtcccagctgctcaggaagtggaggctggagaatcacttgaacctgggaggtggaggctgcagtgagccaagactgtgctgctgcactccagcctgggcaacagagcaagactctgtctcaaaaaaaaaaaaaaaaaaaaaaaaaagaaaagaaaattaaaaaaaaagaattatctgtgtattttttatcttaaacaactgagaatggtgtcattttttccattcctagagttatttaggccaaaaaaatctagaatgttgaagagaacagattggggtgggaggtgcaggttaggggattaagagttctgtcctagagggccgggtgtggtggcttacgcctgtaatcccagcactttgggaggctgaggtaggcagatcacaaggtcaagagatggagaccatcctggccaacgtggtgaaaccccgtctctactaaaaataccaaaaattagctgggcgtggtggtgcatgcctgtagtcctagctacttgggaggctgaggcagaagaattgcttgaacgcgggaggcggaggttgcagtgagctgagatcacgccactgcatttcagcctggcgacacaatgagactccatctgaagaaaaaaaaaaggggttctgtcctagaatagttgcatttgagatatgtaagtgaccgggcgtggtggcttccagcactttgggaggctgaggcagcaggattgcttaagcctaggaattcaagaccagttacctgggcaacaaacacagtgagaccctgtctctacaaaaaaaataaacaaaattaaccaggcctggtggtgtgcacctgtagtcccagctacttggggggctgaggtgggagaatggcttgggcctggaaggccaaggctacagtgagccctgattgtgccactgcactccaacctaggccatagtgtgagaccctgtctcaaaaaataaataaataagaagagaaagatatgcaagtggacaatgacaaagcagctgaataaatgagtctgagtctagagctcaggagaatgggctgagctgtagtgagaatatggcagagattgatcctggggatacatcaacatttagaatagaagagaaacctgcaaaggagactggcagggaggagaggatcaggtgggaagaaatccatgagagtgtgctttttctggaagccaagtgaagctaatatttcaagaagcaaggagttaggtccagtgctgctaagaggtccaataagatgaggactgagaattgacccttggatttggcagatacaatcaatggtgaccttgacaagagtgatttcagtagagtgtaggggacataagcctgcctggggtaggttaaagagaaaaacaaagagcatgttcaattctttaaggtttttcactacaaatggaaacagtgaaatggagtggtagctggggaagtcaaaggaggttttttttttaaggtgggtgttttttatttcgcattttgatattgatgtacataatgcagcaaaaagagaacatgtagtaatgctggagaggaaaggataggtaaccattggtaaaagacctcaaaggtattagaagggattgagatgctcgtccaagtgtatgggctggccttaggctgaagcaagactgcttcaagagatacaaaagcaaattcattaccctaagaatggagtacatcacagcaggattcctggagagaaacagaaaagagggtcattaaaaacttatgtcaccactttaaagagggaagaaagttctgtttggctcttttggggactccagaagaaaagtaaaggtatactcataagcccaactttttaactttctagttaccagaacaccaaacaaggatcttagaatatcagattttcaattaaccctagaaaactaacagcatttgagtagaattcaaatatatgtgagagaacataatacataaataccatctgggaagttctctaatcaacattctccttccctagcactcactgttggatctgtagtacatgcatatgtgagtgaagagctctttcacaaatatgaaagaagcatagtatggatgtagggtgatgatttacttagtgtggtaagtgtctccaagcaacacagtaagggacagaaaaagctgggccagcctgcctctgggagagacatgccaagcttttctatctctgtgaatctcacaagtaaatgaaaataagtgcaagtagtactatagtaattaaatcaaactatcttctttgagagtggctttgtatgtgtgtccccattatttgctaatttgctatttcccactgcttactgattaccctgagtatgttgcatttattgtcctatttaatcctctaaactctatcattgccattttacagatgaaaacatagaggccagagaggtttaaatggcttgttcaaggccacatatctaggaagtgggagagtcaagattctaagtttaatgcccatcaatgatagactggataaagaaaatgtggcacatatacactatggagtactatgcagccctaaaaaagtgagtttatgtccttttcagggacatggatgaagctggaaaccatcattctcagcaaactaacgcaggaacagaaaaccaaacactgcatgttctcagtcataagtgggatttaatgatgagaacacatggacacagggaggggaacttcacacaccggggcctgttggtgggtggggggcaagggcaaggggagcattaggacaaatacctaattcatgcagggcttaaaacctagatgatgggttgatgggtgcagcaaaccaccatggcacaagtatacctatgtaagaaacctgcacattctacacgtgtatcccataacttaaagtataataaataagaatttttaaaaaagattttaagttcagtctttgtttccaaagccagagatctttccactataccacactgcctcttatgtagtcagtgataataatagcttggtcatttgcatttgtgaagcaccttttatttgaagagctgaaactctgtaagccttatctttgtaatctggagagaggaagaaaagaaccgacatttattgggcaccttatatttgtgtgtgatgtaattttaagcactttcataccagacatgttaattatcttcattttaaagatgaggaaatgaaactcaacaaagaaattaagtaaattgcccaatatcacacaactcccatatagtcaatcctggcactttccctcagcagattctaagcaccgttggagcagagagcaagtctgtttttaatcattctgattttcctagtgcctaggacagggtctcactctggcacataataggtgctcagaaaaaaaatgattgaatgaataatgagcaaatgtgctgtaagctgaactggaatgcattgagtcttgtgttgtacttcctggtatcttccagtggatgtcaacatgatataatgagaagattctgagaaggaatcagtgaaggcatgcatgttcctgactgtgaaacttttgctcttctcagagctatacaacctaggtgatagacttccttttctttcattgggaaaactgaggcaaagtttccttggcaaagattttgcaagtcagtggacaatttgtggcacaactgaaatcttgagattctcacctttatagccctaaccacttaacaaccctgtggtcctggtggggttatagctttccataaatctggtacttaatcatttaaagagatggcaatttatcttaaatacacgcctcattatagatgtgtcacacttagcacagatggtctcagaagtttttcctggcttcccataccctaacagtatctagtatgttaatgtcaatattagctttactgttttaggtaactttggtatgcttctcattagctgaaaccgtaaagagctcagttttacctgcgctgagggatcactaaattcctattggcatctgaatgcacagtcccatgtcgaaagtgaggtcatgtttctcctggattatgcccgtatctgatgagcctcggctggcgtgaatccgagacaatgaaataatcacacccattagctcaccagggccctattaagatgtggcctggctttccatccatttctcctgcttggaaaaactgacacagtcatggtttgtaaaggttagtgcagatggaactgcttcaacaaccaaaacttagcgttaccctatttaaacttgggaagggtctgctgcttaatcttaagaaatagcacttcaggagccagggtgtgaggatgtcctttaatctctttgtatgtgatggtaaagctgaattttcctaacaccctccttccccgctctcagcttcagtggctggggtgggtgaggtgggggagctctggagttgtggtttccatactttctactttttattctatttttctttagagatcccaggttttgaaggcttgagtctagtaaacaaactgtaatggttaaatcacgattttattttctcgttgacacctagtgtgtgttatatgcagcgtcctctgcctcatgtcattctccaatatgctttctcagggctactttcccagaccctatgccttcttatgggttgtagctaacagttacacttccagagtatgccgtccctcacccacagagctcttctcacaactgtaactaactgattatttgtgtaactgtttgcatgtttaggctgtaaggatgcagaccatgtctgtcttgctcacagctgtttctctagtgcctaagtctttgcttgatacatagtgggcacttggtaaacatttgttgaatgcattaatgaatcagcttatttaattctagtgaaaaatataaagaaatatcccccttatattggcttggggagccttattctggatatatttgataggatttttgaaatgttgtcaacaacttgaatgaaaatcaccaagtttaaaatgaaggttcactctgggcaggagagaagatgatgctattggagaaggattacacaagaggcttctggaatattgataatattctatttattaagctggaggactcctagggacccaggggcctcagacttactcctgaactggagggacatgccaaataagccacctgctatttatttcacgcacacccaaggcaaagctgttggggccacttaaggattttgtaaaatgtgagggtgttattaaagtaggcttattattttacagctcttatgattgttcacctaactaccttgaacaatactgcaagtatttttctctgctcacatatttggagacatgcagagccacttcaaacaaaccatcctgacttcccatttgtatctacgacctcatgaacccatctcaaccccccaaaccacacactgaaactaagccaaattaaaaacaaaaaacaacccaccacccagcagtatttagttgagcacctactgtttgctttgtattataagctgtaattacaacagcttgagtcttgtcctcagcttcctgaaatctcccagtggatggcatcatggaagaatgagaaagttatccaagaatgaatggtctgatgtcaaggaagcttttcagcctttcctaatggtctgatgccctctgtgtgggttacaatctttggaagtataagatttcttgtaaaagtcacagcacctgccaacatagttgggcagggacccaagtggggtgacttgtaccgcattcctccctggtattcagagaccacatagtaccagaagcttgctaggcccagctcctggggactgtcagaggaacaggcccaggcagtcttctcctcagattgcaatcaaaagttgcttgataaatcagtaagattgaaaatattcttggcagtttacataggcaatggtaagaacatgtttttttgtagttacaatgagtacattatacaagggccggaagtgaccaaaatcattgattggctaattagacataactgaagggtcataatgcttcagtcgttatgtgggaatattcataaagcacttgagttcagctccaataaagaggagaaatgtacccagggaaattgcagagtaaaagtctgggaatgtagatagtataggatgttacaggtctgaaatggaagggtttactatattattgagttttgcaaacagattcttggaaaacagattcctcaagtctttcccagctttcagatgggatatgaaactagaggctttagcctttacttgtggttgtctaaaaatccaccctatttttcttaggaagggaagcagttgccttaacaccctggccagattcccaacatgtacagggtggcccatttaaaacaggcctgtggatgcttcagagtgagcgaaggggtttgttgtaaagcaccatgtgtatgtgggtgtttaatgaatatgagctgattaaattggccaccctgaattataacctcataccttctctagttcctctccagtttttagctcaggaccatattcttcctactttctgctcaaacttgttagggagaaacgttcccactattaaaactgccagtgttttcctcccagtgtttctttgtttcaacgatgagcagaagaatccagccttggaaatacctttctttcaaattgcttgtccagctgcaatgacgtctgcatcagccacacccacatcacttccccttcgaaccttctcgcctccatctgcttccctgtctctggtgtaggacaataccagtatctgtctggagcagatagtgaactctgccacaaacagaggagggcttgtgtgaagaaggaaaaagctctgctttcgaaatcaagcagcctgggcttgtgccccgtttttgctaatagccatctgtgtggcttagggagtcactgtcttcacaggcccgagttccttcatctgtaaagggaaggagcgagacaaaatcagcacttctcaaattgggagctgtagattcttgaggtctgcaagtttaatgagattttaaactttttatgaagtttttttttaaatcataaagacaatactttgcaattaaaagtcatttaaaaaaataagtcttaagtttgttaagctggtcattctgaaacttaatcttaggtctcctagagattttttaacagttttgcaagtctcaatttttcccctttaaaaggactccacatatcactccagtttgagaaacactgaactcttttcatctactcagaaactgaatctagcggtaggataaaacattagctttaactttcttatccttaccctactcaacctaattacttttggcccacttcaatatgtttaagtcttttagcacatgggctccttttgttttcataactgaagtatttcctgttttcaatcactatatgttaaattataaaaagcatgtttctcccaatagctctttccctttccctttaagactcagatcatttaatttattagtgcccaacctggttaattgagaccaccttcctctattaatgtttctttgttggttgaagtgaagagatatatggtctgttccctaagtacccatgaaggattggttcaaggactcagccccatactaaaatcttcagatgcccaagtcccttatataaaatcacataatgtttgcatataacctatgcacatcctcccatatactttaatctctagattacttataatacctcatacaatgtaaatgctatttaaatagttatcatgctgtattttaaatttgtattatttttattgttatattgttatttttcattgctttttttttttcaaatattttcaatccacattggttgaatctacagatggggaaaccctagatatggagggctgactatactgcttttatctgtgatctcaagattgaatactcacagtagtttatgtatgcattctgctttcataatttgcagaatgctctcatatacattatctcttgattttcactgcagtcttgtctaataaatgatgtaggtagcatgatccccattttacagatgagacactcaggcccagaaattttgcttcatatcttctgattcagtctacttgttctcccaacaatgcttcttcatccaattacagcaacaaatacatactaggtacctgttatttgccatatgtgctgctttattgttacttgttccgggaaataacaagtggagcttctcattcaaggataaactgatattgccaggccttgctcagtctgacataagtctcatgccattatttactaaaatagctagctactctcacccagtccggttcctggtacataaaggaactcaataaatatttattggatgattgagtgaatgaataaatctaaaataaattatatcattaattaaaatttatatattggagataatttttgctaatagatttttgccaacattttttcagattccaagtcaataggatttactcagagactgccaagtgctttaaggggaaaacagagggactgctgggagaagggggtgcactggtagacaagtagaggaaatcccctttctggcttcatccatcttcctgtctatgatcggtgtcctaggccttagagtggacatggagaatggtatcactttgtctgcctgcagttaaccaaaatacttactcccaccatagggagaagagaggaatgacagaggtatgtgaagattaagtagaaagaccgacaaatgtaatcacattggaaggtagaatggagggtagaaaagttggtgggaagacaatttctgtggtcaggatacatctgaatggaaaggggagagagattttgtccattcctcccatagtatggtttggctactttccctctacttcccaagagaattattagtgaccagggacatcacattttaatcaaggcaactgttgctgggctggtaagcaaggctcccatgggtgtggtgaagttagcagggtgaagagtgaggctgctagtcacaaagggatccactcaccctcttccgctgttggcggctgctgtggtatctataaacatagagtgtgtactcacatactcataaatgctagttattgtcatacgattgcattgtgtataaaagtagattgcctggaaaaaatgattccacttcatttttatatacacattgttcctggaaccacttcctgaaatcccaggcttttattttgctgtcattctcttaaattgcctctttctcaaagcatccgggttctggagatgttctcgtgcttaaagtgtgtttctaagtagcttctgggaaccacgtaaaattgtctggctccacttgaccaatgaggagcttacttttcctcccaattattcctctctgacagaggccgttggtcatcttgaaaagctaagaatgttagatgggaccaaagtaaaattgcaaagcctattcacccagccaaactgaaacacacctgattaactgaccacacacatggtctcagaatgacatctcacttggggagtaaaagccaacagttgtggttagtgccccagcaggccccagatggttagagttaatatacacctatgttttctgccaggtagttttcatcagtttcctcaggatgtcagtgtgtgtgtataattaagagtatttaatcatattataattccccacagagagatggagtgggggatgaaggatcgctggcttttacagtctcagcaagagtcatcagtggaaaaaaataaaaacagaaaaatgccaagtctctgggctgtgcctgtgccataactcactcagaagtctggctggcaccactacctcagtgtcatttcagtgaagatgtaatcccaaatcttttgttgcaatcttagggttctcactattttaacattagcttagaacatgtggattgcaaaggaaaactgtgttctaattccctgttcatcaaggctgtgatttgtgtacacccacataaggcaaccttcagtttataagactgatgacttcagtcttgtaaaaataaatgagatgggcacttcaaatattttaagttagatcaatcagtagggtgagcacagtttaattggcatctattgatacatttctaaattaaaagagcagaatatagagccatgaatcttagccatgaaatcatgttcacatttattacaaatccataattctttcctatttccccatatatcctgttttctttgtcctgtcaattgtcaaatttagctgctggaaatgatctcttattttggattaggaaaccaagtcctaatgaccgtaagtgacttttcagagtcacacagctagttagctagttagaatctgactcaccagaattccagtctttctactttgccagatagtctttactgggaaatacttttttacctatttcttacaagaatttacttatgtgagcttcacttaaagcaatattggtctatttcctagttcccttaaactgatcatggtgcatttctgttaaaaaagccatagagttggccgggcacggtggctcacacctgtaatcccagcactttgggaggccgaggcaggcagatcacaaggtcaggagatcgagaccatcctggccaacatggtgaaaccccgtctctactaaaaatacaaaaaaattaaccaggcatggtggcgggcgcctttagtcccagctactcgggaggctgaggcaggagaatggcgtgaacccaggaggcagagcttgcagtgagccgagtttgcgccactgcactccagcctgctcaggcgacagagcaagactccgtctcaaaataaataaataaataaaaagccatagagtttctttataattaggttctaacactacttcttcctattagtcaataacagtgccacaataagtggattgggttaaaatgaaaatcaccaattgagtctctacccaaaaccccttccagttgctcttatttaggaggaaacagcttctgctcagtttctgtccactcacaagacctctcctgcatggaaccctgtccacagtttctatcactccatctgtgcttacttcagattatctctgaaacaatcagatgtaatggccagtggatgcaaaatacatataaagtaagatttgggattaggaggctcaagggggatggatatgtagagaaaagacctaggaagaacaagaacagggactggcagaaaacacattctgagacaaaggccatttatttagctctggccagttggtttatctagcctgacatttctcaacctgggcgctattggcgttttgtgccaaattattcttgattgtagagagctatcctgtgcattatggtatgtttagtagcatttctgcctcttcccactgggtagatgccaatggcatcccttcatttgtgacaaccaaaaatgtctccagacattagcaaataccctggggagtgggaaagggagagagaggaagaattgtctccggatgagaatcactgatctcactcaaggttttatctttgacatcagcgccataagatattttgtgagaggacagagtggcctttctaattcttaaaagttagggttctactccagacattccttatctactgcaaatacaaattatttatttgttcattcattcaaataacagttattacagatgacactatgtcaggctctctgctaagtctaggtgaaaagacagaacctccccacaaagacttagaacttaatactcttaaaaatcctagtcattggagttgatttgctcaccaatgctaacaaagttaagactttgaggttgtattcccttatctggctttaactcagaccaaccatttcactgattggaccagcacaatgtatcctggctactctaaaagtcacttaaaaaaacatatcctactggtggtatgttgatagtttcctgggatatgaaggtgggcatggttaaagctgaaaggactcttagcgacaagtgaaaaaaacctctttggtaaatcactagcatagtattacatggcttttttttggcctgggtgcagccccctttagactcaaaccactgttcttcctgataacacatggccttatttatgttcattgtatttatttagcttattttgattcctctttctacataagaaaccacaactggaaaaatcaattaatttttaatttgctcataaatttctacccattagaaggaaccaaggactcttgtaatttggcacaaatttcctttcagtatttttaatctctttggatatgtgtgagttgaattctctttaaacaacatgaaaatatataagctatttatataacttttaaaagtatcaaagagaagactctaacatccctcactgaagcttttccagaatttaccatgtgtaccagtgtaccagttgttctcaacccagggtactttgcccccagaggacttttgacaatgtcacagatgtggagggatgctactggtgtctacccagggacaatgctaagcatcctacaataaacaggatggtccctccaaccaagacttatccagcccaaagtgacagggtgctgaggttgagaagccatgtggtatataacacagatgtacacactggaggaaacgtcactgaagtagatgctggtcacttaccagtttcactccttcaggatatcctcttctttaaacgaggaggttgtgactagttacttcccatgaaaagcagctgacccttagggttgaaaagtatgtttattcccaatagcagtgaatgaaaaaaaaaaaacacaatgaatttctacttgcaagaatgccatctgtggttttctccaagtgttgctctcagccctcagtgttcagggtcttcttcacctgtgcattctgctgccctgcgttatcagagttagaatcagggtggaatacaaatatttccccaggcat[450 bp omitted]tattttcttccggaaaatcttgttgtttacgtggttggaactttattattacacagattattataaaaatgaaccaacactcaaaagtacaaggcaggatttcccacaatggctatgtcctggctggccttgttgctagctggcacagtaatatgccacctggaagcaatgaccattggaaaagaagccaggaaaaaaccttatgagaggcacagggcagtagataatttgtgaagcggtcgtttgcctcccagagtggcaaggctggcatgtctggcctaagtgtacactcacgtcatttatcacatcctctggtagcagcgcctctctccactgcctgtgaaggaaactgttgcacaatcctgaagatctgactgaaggaaagttgtcttgggatcagaattaaggttcctttttcttgttttcgtttccgagttgcaagttatgcccctttttagcgttcccatacccagctgtctacattttaagcaatcgttatatggaattatatcttaaatgtaaaataacaagaattcatttaaaataactgctttccctccagaaccagaggtatctcaccaaagctgtcacctccccaccagtatactccaattgtgggtgacagttgtgtttagaaagtggtgttatagctccttttatgtaggatgattactctgtggccatgaccttctgggatgaacggaaagggctggacagagttacacagcacgacgacagaggagaagcttgtggaagtgcattgcaaacagagatgggcgagttaagttactcaattgccatctgcctctgttttgctaactcattagttcggacaccacattgtgttaatccccacttccctggctctgagcttggtccaggtctcgggggaacagtgagactgctcagctcgaccctcctgtcagctgggcctcagcttctctgcatcgacagcatgccaggcctgccaccctcgctgccacatcacatcaaggtgaagttttctccccagcccctggcaacagaaattgaagcctttggacttcgctcattcttccaaaagacttttctaggcagtgggatagattttcgccttacaccccctagcactctcttcccttccagcactccttcaaggcaactgcaatttcaggctgaccatcttggaagtttgatggcactgagtaccaccagccaaatgctctcacattttctgtgcctctcagaagaagagcccatatggcagctaagaaccaatgagtgaggcctaatttgtcccccaagactatacgagaagggcagtcttacttctggacctaatctagcattacgagcatccagtgatgacccttacggtactttctgagagtagttgctcataatcatcattgtctctgctggtgagctgactgggatacgcaaattgttcctatcaatttattttgacctctctggacttcagtattctatgtgtgaaagggtattttctgagaatgattagataatttgtgatgtctttttcagctttaagtatgaaaatgatatgctaattttatatgttgtcagacactactctaggcatttaacatatgcaatcccatttattggtacccaggaagtagacactattacatctctgatttgcagatgaaaaactcaggcactgagagattgtttgttcaaaggcaaaggtaataagtgacagcccagagattggctcccgagtctgtgctcttagccacttgtggtcacttaagatagtcccttaatcacttcattgctctatttcccgtcttctttccaaagtctgtgggttctcaaatgtgatctcatcaacatttagggcagtatcctttggaggttattgttgcccccttttttacaaatgggcactttgagataaaagcaggccacatacaagctattggcagaacccaggagtccagcttttgtgctgtgggttccatctgctatgtgtctctcccagtcataattaggatgatcaaaaaattcagatataacctgcttacccctctcaaccagggcaaatcagaaacagctccatagacaattgggttaagtttccaactcaaatgttgaatgatctatgcagaatataaaggcgtttacaagccaatgactgatacagatgcagcaataacatacctttccccagtcctctctttgctgtaaggcacccactgaatatcttacacctctctggatagcaggagttacagcaaattctgcatatgccctcccacatttagcacatgcagggctcatccaagaattttagcagcaggggatgatagagtttgttctctggttctttctgactgtctctgccctgatagtgcctagtacctgagtggcccttcctctgtcctctaatcccactggattgcacgtgccttttagcactggaggttctgaaagccaagcaagaactcctcctaatggcattcagtacctctttcttcccagtcccaggaggggtttcccagcaagcagagggaaggtgattgtttctacctctcatttagtccttcctttccaacttgatggtataccacctgcaaagctatcccagaaacagatgaaatttaggatgcccgaagactggtttgtgacatagaaaaattggaattgaaatgaaactgcacattcattgatatcacctctcctttgtgagtctggacctaatagagtggaatgaacaacaatactgaaataccaaacttatttatgcatttaagtcaccaagtgatttgggtttttgtatcagggatggttgttgcttttccctctgcaatgttaaactactgacccgtttcctctcaaattccagttccacgtttaactgaagacacacagaaataaatgtgtgttggcagaaagacaaaccctgagatgaagcaggaggtatgttggctgatagaaaggctgttattttaatttcttttacattgcagcagtctcagatggatagtatccaggtaacttgtagcgcctgcatcttattaaactcctgtttgattcagaatttacagctaaaatgcacctggaatacttaaagtaggaactagactttggttcatttgttctcaaaagggatgtacaaatcgattgcacaacctacagcaagtggcataaaaaccttcagaataagatgatggcacgtttttgttaataactatatttcttgatttataaattcaacaatgctaatttagtgtttactgtttgacagacattgtgcctctatagcaggatgaactcacaggcatgttttctgtacgtctgtctctttttattgcatgtgacagaaaccatactcaaagtagctgaagcagaaagtaaagttatcacaaggatactggcatatctatagaaactaaggactgggatgcagctgactcaaagaagagatggaaccagtgttaaataacattaagttagttggtctcacactcttacacacacactatctcttacacacacactctaccactacaaccactaaatagctgcactgtcgctacatagccaccacccacatgtagctactgagcacatgaaaggtgccttaagtgtaaaatatgcactgaatttcaaggacagtatgagggaaaaaaacataaaatgtcttaattttcatattgattacacgttgaaatgataatgttttggatatattgtgctaactaaatatatttgacatttattttaccaatttctatttttttcatgtgcctactggaaaattttaacttacatatgtgacttgcattgtgtgtgtgtgtgtgtgtgtgtatatatatatatatatatatatatttttttttttttaattgaggcagcctctctctgtcacccaggctggagtgcagtggcacagtctcagctcactgcaacctctgcctccctggttcaagcgattctcccacctcagcctcccgagtaggtgagcttgcaggcgtgcatcatcatgcccagctaatttttgtatttttactacagacggggtttcttttgctgtgttggcccggttgatctcgaactcctgacctcaagtgatctacccgccttggcctcccaaagtgctgggattacaggcatgagccaccacactcagcctggacagtgttgttcttctagttggttttcctaaacatctacagcaacataaatcttcccatgccttagttagcctgatttagttgagaaacactgaagggacaatcagagacatatatcaccaatcaagtatatatcattctatttcatccttttctctctcctttactgtccctcataatttctacatgagccgaacacacacacttctttttgaaagtgaatgtatatattcactcacttcaaaaatacttactgaaccccaattctatgctaggtcttacatcaggcggtgaggatacaaagtccctgccctcacagagcttcctttctagcagcctcagccacttttagcttgttttcatgaatggagccctgatgtgggaagtgcacctcccagcgtggctgcatctggtccaggctgaatgattaacccttatagtgagtctaagttgaatgaaaacttggattttcagagtcgccattaataccatgttgtcaagggagatggcaaacgatgttgttattcacaagtcgggagccttcaatgatgtaaatttgtatttctcttcccatttttatggagccatatttcagaattcagaaatggaactatggaaatatggctctccccgtccccaaaaagagtccttcttctagacttcttgacaatatgtgtgaggaagcctctggattcagttgttttgtttttttaagtaactttttaaatgaagtataatatgtaaacaaaaaagtgtgtacatcgtagtgtatagctccatgaactttctcactgagcacacatgtaaccagcacccagattaagaaacataacattaatagcgcccatggaagctcctccttcctgtcatgaccccatcccacccctccaccctcatcccaaaggtaactaactactatctggacttctacaaccatggattagttttgcctgtttttgaactttatataaatggagtcatatagcaggttctctttggtactattttcttttactcaatgttatgtttatgaagtttattcatgctgttttattaacccatagaaaatatagatagctcccaagaagaaacataaaaattataatcctactacattaatatgtcagtgtttgtccttctagccacttttctatgtatatacttatgttaactttttttccaaaattagaccatagtgtgcatactactttgtgatttgctttgttgtttgatatatcagatctaccaatgtgttctaaatgttggtcgttgtaatgaggctatattctgaattgactaataggtaatacagaaaagtagaaaattattttttaagtacccataagtatttatattaatcattttgtccgatgtagatttgatccgtctcagtcaggcttccaaaagacttccaaataaaggtagcgaacaaatggatcactgattgctagggaaatctggtaatcaagaccaagttgggcctcttgtttctcaatgaatcttctaaatcactctctactgttttaaacctaggtattctgcgaatatgtaacagattaggaactgaataattctgagaatggcttgttagagtctctgttcaactcttggcttactctataatctgagacaagtctgtaaaatgttccttatttctcagacgaagagcctcatctccacatctgtttgggatcataagaaataatacttacataacattttggaatccttgaatgaaaagttttttggagttgctgactgttcctaaaatttcctcaactaacattgtggaaatccattgttgtggatatagttgctgagctaggtcataactagattgcaaatcttgagtagtggaaaaatctacgcctcgaagttctggtcatttattttaaaagctattcatttattcctagatgttcatactgtgagcttagcctgttatcattttggtttacttgctaaatattcacatttggggtcttcatccttacccatttaggattgtatctattggcatatgccattggatttgtctgagtgaggtcacctggaacactagtgttctgacattgagtttacactgcagggatgagagaagtaaatattcctattagtcagtaaggtttgaatttataggctgagactcctcagacactgactgtctgggacccttggagacagaccagcattgaatgaaactgaaaggtagagaatatactgtggctgggaaaagtgatggagcaaatctatgcagagatacaatagtaggatatttaagagttggaagggatattagaggccctgtggtcatacttcatttttcagttggggaaactgaggcttaaggaggtcacagaatgagttagtcacagagctgggttagaagcttactttagtgtttcaccaactactcagatgtctgcactactgagatacatagagaaagagcgtcagaggaaggattagggtgtcctctagacctcattacactaatgcagtccctggtaggatctaaagacgtacttgtctccaagacacctgacaagctgagagtattgattcattctttcccaacttgggattgcaatggtgaaaggaatttggcattttatctaatcagcattggaaacttggctttcttttggagaattcaaaagttcagtttaggatatgttcacaagatactttcctccagaattaggtgggagataaattattaaatttatgagacttgtctttctttctttctttctttctttctttctttctttctttctttcttctttcctttcttctttcttttcatgtagcatttctttttcacattgtttctgatgacccttaacccctgctttttaaattcagtttcatttgtgttgtcacatatatatcagttgttgagtctttagtatgcggagatgctgagcttgcccttccaagatgttggaaggtcaactcactttatggtctaggtccaggaaacaagaatatttccaactcgctggggaccatcttggccttgagcagaaatgggatctgaattattacctaagagacctttgtagattgtcacagttggcagcctcaggacttgagctaatcctggaaattctttaacttcccagaaagaaggttccacaagggcaggctgaggtcctcagagagagcagatggaatagagcttacaaccagttgcctttacaactggacttggagataaataataacattatacccattttttttttatcatgaagcctttgactttcaggggatatctattctttattccttttaccctgtatgtggaaaaaaaatgctctgtatgaaagaaaagcaagcaaacttgttgactcagttcccatggtgaatgcaaggcagaccaggccaatagaaacaactcagatattacaaaaatgtgtttctttctggcagctgcacagtcagtcctttatatccagtcactgcaatcgccccatcacacaaaaccatttccaaggtcattattctggttgcgggggctgcttcccctacaaataaatgttggttttactaaatgtcctctctctccaactcactttatggcaaatgaggagtagcaaagcatcatttaggaagagaaagtgtagaaaatcagagagatgaaatactacaggttttctaaaggctcaggtttatctggctcaagcaatacaaattacaaactatggcaccacctgtataatctggttttaattaacttgaggaaggtacatcaatgttatttcattaaaatcaaattctgtttaaatggaaaaccaccactacagggtacattggggcattgttcacttgggttttggggttggcaagtaaatcctgtatttagaaaaacccaagcaaaccctgtttttttggaatcttcttatgcttcggaaggcttgtcataggttccttggaatgtagggggtgccctggtgaggaccaaggcacagctcaagatgttgtttgccaattcttccttttatgacccttctagtcttctgtcttcctgctccctgcctgtctccatatctctttagtgcttggccttgatgccctataggactctctctcccatttgccactttgaactgaatgatttgatccccactgggtggacagtggatgacatagggcactctataaacaaagatgctatttcaggcttacaagaggaatgaggcccacgtgatcacaaggggctggtgaataatagaaccctcttttgaaactctcacttcaccaattacctaagagctgggaggaacctgaaagatcctataatctacacacctccttttccgaggaggacactgagattcggaggtaaagaaactggtccatactagtgaaggctgtttgagtggggcctccccatttcgactcatgccctttcccctccagcctggtgccccagttctgcagacctgttgattacaacacagcccacgccgagaaaatcctgccctgtcagcagaacagctttacaagctgacataggacatgtgtgtgtttggagtcaggagaatggctgagttttagttccagttctgcctctgctttgctggcttcagcgagtcacttctccttcctttgtctatttcccctattgggaaggagaagataatgaacctttccacctatcaggctcacttgagtgttataaagaataatgaggtgatatttgtaaagtgctttgagctgctgggaaagaggagggggtgagctccgtggaaaacattattagctggaagcacttatcaattgagctatttaacaatagcagagagtaaggatactcagaaatgaattccagggactagccctgctttgaatttaggaggaggattagtgggaacctaataggtattccgcttctccagtttcttcagtgcaccgtcaaactaggaaaggtaattacattcttctatgtcggattcagcccggagtttcaattgggatgtcaaagtgtgcttgtcctctattctcatactgaggctgtgttatggtgtgattgttaaagccttgggcatcttctatcccctggggtaatttcgcttaggagctatacaaagtaatttctatgcagtggctgggctgctgtttataaggttgattagtagagcttctaaatctaaagcgcctggggagcaatttggttgaagcagggaaataaaaggcaaggtctttatcatggttgatctttttttattgagccgctccatgggaattttctcagtgactcagatgcatctacagtgcaaaacgtggggcttggtggctctttgacatggcaatggaggcctagccccaggtaaaggtgaacttgccaggtcactaaatatatttagggcccccttttaacttcctttactctcacagagggtgatgtttttggggccctgaaatgtgtgggaatgtttccaaaagattgttctgatgagggatctgtttctgcaaactcctgccccactgtttgaaagaccgtctgccccaaattcaggtctttctcatttttagggccagggaagaagacagaggaagagaagaactgggggaattttgttttgaacttgtgcagtctctgtgggctgactgaacagtgagccaggcagaaggtggctccctctttagtcggcaggagcagggctgaattttatcaacatcttctgcaggtgtagggagaggtcaagatgtcatttggaatgataatttctctgatcaaagttaagttaaggaaattacagtgattgcatctttgtcccctaaagtttatgagcctctttgtaatcgctgcttccgcaaacccttccccaccttcccaagttctcaggcctccatctgcaggggctgctgggcttttccctccaggaaggacgggctcgccagctggccagaggttcctgtattagtgctgccctgtactgacttgtgagtctccagtaacaatcctccggtgtggcacagctacaagcaatgaccagggaggcccaccttgaatcctgaacctctttgggggctgactcagtcctctgaaactgactcttggattccttcctgggtttgccaccaactcattttctcagcaaatcacttctctgccttgagactccatgaaataatataaggtttccttggcaggattctctgacctttttcagagacccagatttcttgtttattttaatttgaatgtctcaatcctctgaaagcatttggaatattttcttcatttccctctcccaaggtatctactttatcccagacagggctcccccagtgggttttgaggggaaggatgctgaggctttgggccctggctcctgtcctttacttcacctctgccagggcaaagaccagcactgggctgacctccctgggctgggccaaaagagaaggctgtggaagccgcacgtctccgatgctgcccactgtcctttccctctgcagccacagctgcctccagcccccctcacccccgcctgctctttttctcagtgagcctcagcgccagtgccccagtgagctgctgggaacagaggtccgtcccctgcactggcctcggctccccgcaccagaacattcaggcatcaatgggaaacagcaagatctgtcggcatccccccctttcttcaggctttgagggccacattctccacggccatctgttccctttcacctctctggacaatgttgctttttaaagccagcgattcttcctcctttatcccctcctctcccgcctccccttcttctgtgctcccaccctttctacctctcctctctttgcccgattcctatgaaattagcctctcttaagataagatttgcccttcctccatacaaagctgttttgcaaacactatgggtttttgaatttttatttttacattttgtttgaagtgagggcttgctacttttaaagtttgtgattgtcttgtggagggggtagtcttttgatagggataggaagggggaggatagaaaaactttttagtcatgaaaaaagaaaatacagaataataatgagttttaggttcctgctggcaggcacttgcctctttaaagaaggaatcctccctttcctttccttgatgatcagtttaaggaaatttttatgctctcgaggtcttcccaccttttattgtattactattttgttgttgctgcaatgttgttgttgtgctgtttttaatttagagccagggcttctgtggatctggtacagcggattcctttgtcttggacagagccatatacaactccagaggttcctggattcaggcagagtgcccatggtgccttctagatgaagcaatcatcctgactcaagggctggacatcaaggggtgtttgccccaggactgaccagtgactaagtgtgtgaccttgggtacatcactttctttaagaataatgatgacagaatcatttacttcaaaaaatttttaacacatgattcttctgtttttactattacttggtttcacaagcaagacgagtccgtggtaatgtcatgaaaacttatgggttatccttgggtaaggatgtaccaagaatccaccgttagggtctagttgagcagcagacatgggaaatatctaaaacaaggacggactcctggctgtggctgcctgtcaggatcacagagcagggacacgggcaccggcagagttgggctgacagattgaatcctgtctctcctacttactagctatacagatatcagtaaggttttgtcatctataaaataggggcaacactagagatatactttgtatggttgttgagacaattaagagatttttatcacgtaaagcacttggaatagtttctggaacctggtcggtactatgtcgttgtccctcttcccatcccacatccacattacagatgaaaacatgggctaacgggttttctgcagggctcttcttagtctttcacattcaccttctgctggttcattttttcattgcagagtgaacactgataaaataaataatgtaattatcagattataatgatgattaacacagcgattctatttagaaatgtcataaaatagtgaaacatcctaagatacagaaagatatatgatcatgtacttctggcaaagaaggtgaaccagatgtggagatgatagtcatagaaggaaagccagtcatgattttggcaactgggatcaccttacatattttcagttggagaaaacctggagatttatttttcttttggtatcaatttctagaaacctgtcgtatgactaagagtttcccaacaatagggagagaacattattaaaatatgcttttctagaaaggcccaaatgactctgaataagaaactgaatattataatttaatgaggaaaagaaaatgaatgggatgtccagaaaattggggcggggagggggtagtttccatgcattttccctcctagaaagggagattaatggccattcttgtaatatctaaatggccaaaagaaacaatgaaaagaaaaataatgaatcagactctggggtttaaatcctgactctgccacttgccaggtggccttgggcaaatcactttctttgtagcgcagcttccttcactagaaaattggtatgataatggtacctccctcacagagataatgtatgtaaggtgtttagcctggaaaacaataattatcccaaagtgttacctcataattctttactgtaatgtcttatatcaactgacatctgagatgtgggacacattacccaaagttggtagtcttgatcactttgcggatgctggtcatttgcagtaaacccatagttctgtctcatttctggataagcattggccttcgaggaagaaggaaattggtttgcttaagaattcatattttgcagatgtgaactgactggctactgacaccaaaaccagttcccccaattaaaataaccctgctagcctcagcacattttgttcatgagctccctctcccgccatgaggcggctgcctgaaagtacttgactgccctaccctccactccccggggattgggacatgcttgtgaagagatacttgaggaagttaaagcaaggtcatctccattgcctaagccccacaccctggtaaactgcacactgtttggaccttgaaacttgtgagctgcgaattcctgtcataaatggagttttcctccctcctgtggccccagtttgtggtgagccttgtgttggcatggtggccatggggacacccctcgtgtgtgtgtgtgtaggcccccaaaaggagaagtgtagcagcttccctcagccttgcctcagaaagccgggtccagatggccaaggaagcacactgcattgaaggaactctgcagccagagtgaatttaccagtgtgggaaacaaaaacgttcgggttctggtctaaaattctgggagcaaaggacactgggattgcctccaccaaatgtcaacattttacttcttcccccacccccttctcagagcctcgagggcagcaaacatatgtgaggccagcattccattccctcccacgcaggaacatatgctgattcctatcaggatcctctgcttcccaaagaggctgatggagatggggagggaggaaagcataaccataaatcctcacactctgggcaaggtgataattgaaagcattctccaccatgacgtgctctccagtgccagggcagcaggcagctgggacagctaaagctggagaaggcctgggccggggcccagctctccctctgaccaggtgaattttggtggtcaagtcacttctctgcctatgaaacgggaataaggattgtatccatgttgtgggatcaaaggaagcactttaagtcaaattcatcagatgcacttaggcactctggagttttcaaagcacctcagcatttctgtcttgtctcacttgattctttttgctcccctacttgcactctgttcctgctgtcactgaggaaacacagcagagtgtgaactctgaaagctgacccttgtttggtgtcttgaagcaatgcaggtcaaggagcaagactgaggaggggccttaatgagggtctctgagtgaggacctgggcccggtaaccagccctggcctgtttcatgcccaggctatcagccgcccctcctaccaagtctctctgaattaatattttgggtgtctcctcagacaacagctccaagcagatgaattatggcagttctaaagggtatttacatctcttctctctattcctcttgggaagcagggtgggggattaagtcagtcttaaaaactggctaaagggcattctccagaatgatgtcttctgagattaaaaggacacagagccacatcacaagatactaggtggagattttctaatacaaatgcatgcatgatggtacatggactgtctgcgggatctgaggagtctgtaattgcaggcaaaacagcaaatgcctaatacatgattttttttcaaatgttagcatatattaggatcatctgagagaggtttttgaaaatatggactcttgggcatcacctccaaagattctgattcatcaggtttgggatggggcctaggattctgcattttacaaagttaacagatgattctgatgtatagaaacatatgaatgccctagtaatttctccagagatccaatcccatgtcttgattttatatcaatgaccaagtaatctctctggaaaggccaacctacattttcccactaatttttttgggggggaaggagagttcaaacctacagaaaagttccaagaaaagtatattgaactccccatataccctttacctgatttttttttgtgtttttttttttttttttgagatggagtcttactgtgtcgcccaggctggagtgcagtggcgcaatctcggctcactgcaaactcctcttcccgggttcacgccattctcctgcctcagcctcccgagtagctgggactacaggcacccgccacaatgcccggctaattttttagtagttttggtagagatggggtttcaccgtgttagccaggatggcctccatctcctgacttcatgatccacccgccttggcctcccaaagtgccgggattacaggcgtgagccaccaagcccagctctttacctgatttttaacactttgcctcatttatttttatctcttgtatattagttaccaatttattttataatattgttaacttattataattatctttgctgaaccatctgagggcaagttacagatatcatatcctttcatccccaaatacttcagcatttatctcttaagaacaagaacttctcttacataaccacagtacaatgatctcacccaggaaattagtattgatacaatactattatataatatactggcaatattcaaactttgccaggtgtcccaataatgtactctatggcagttttttccaggatgcagtccaggattagacatggcattttagttgaaatgtctttttgcactaatggtttttaaagccattgatgttctcccagaaaaatttttcttcaagaacatatttcctaataaacaaatcatatttcttttctcttctgttcttactgcttgcaaagagccagtgatccaaagtgggcctgaagcaacagcaggcttacccaggcctgattcttcacaagctaaggcctgggcaaaggaccctctctcagccctgggtttgccttgtgagctgatttcctgaaggcaaaccacatgactgctggtgtgtccccttgctgttcagtcaagtgggtggccacctggctttctccttgtcccaaagtacttcgttggatatgtaaagcgaccaaatgttacttcactgtagtttgaatcttacccagaaagagtgactggtaaaggacatgccactttgcacccttcccagctctctccaaaggcagctggctgaatgcacacttctgagggtgatgttttttccagcactcagggatatacccagtgtgagatcagaatcagcagctgtattcattctgcctcagccagtgccatctgaaacaaacatcaagtggtcaaaaaatgagatggtgaccatgtataatacacaagacttattagaattcaactctggtatccgcctgctgcctctgactctacaatgggagcaggaaagcaaagctcataccaggacagctgaaaggtgtggtctgaggatttcatggtgaacagatagaacacactgtgggggaaaaaaaacatattttatgcaagcatctttctggcttgtcttgaatgaagctaaatttaaagagaaagtgccacagatttctttaaatggttaggtttttgttttctttgttttattttgctagtatttacttaagggtaatatgtgttttctgtaatgagtgaatttatttttaattaaaaacttatttgcaaaggtcaagagatttcactacaagtcaccattcaggattttttttttcctttccttaagtagaaggtagcaaggggaaagctgtattggagaaaaggttcaggggcatggcctcctggagaatgttgggagttgagctgatgggaggagattgcttctttttattcagacaatctagttctgttcttcttatgcctactattgttttccttgccatctttgagaccttgatgatcgacactgcagacacagcagagaatcctagtacagactgaagcttttcgtataaagtgagcatgctcactgtgattctggacagttcctacatagtatctctgtaggataacatatgtcttggttttctcagggcaagctcagtttatctctgttatcccagtataactattaaaatgtccccatttcattttcaaaaatgtcctggttggataagaacttaaagtattttgttaagactctgggaaactgaaggtattttctccctgtccatgagccagtggagttgttgagtgatttgtgctggtgcataccagtctctagcctagtggatggctcacccccgcttctcccctaccttgtgctatggaggatccatccctaactcttgcattccagaggttctgattgcctcacttcttcctgtcttctgcttcacatttcttacctttctcagtaacgagtttgctgagacttgcatcagcctaggtatgttgtgcaagtaaagcctctggactgcattcactcctttcacctccagccaagagacatcaggaatgaaattttctgctttactaaagtgaagcagcccattctttaccagccaaatgccttcctcggtgggtaaatggtattagttgaagcagttattacatagttttatgcctcagatcctgtatttataaatctgaaagacgactaatagctttaaagtattttgagaatctcaaagctcagaagattataaataacaaaagatatattttttcgtatctaaaatggtagcacaaatactgcggttgcttacttaatagatagcgtgtggtccctgagccattgcagctgatgggttttttccagtgctctatttatagagctaggtcagaaatatcacttccgttggaacctgacctatagaccattgtcaattttagagacccaaggaagtagaatgcaccctaaatacagctggttcacagattcagttagtgaaccacaagccctcaaggaaattaattttgctggaagataaatgtctgagcctatcccagtctcttttctttgacacctttgtcctgtggtctcacagagcttgtaggtcatcttgaatctttattctaaaaataacctattataggcagtttcccagctttaataacttactcatcctcttcgccttttgttgctaaaattctgcattgaatggaacaagaactgatgacctgccaagagaggtaaccaagattctcagtcccttccccagttcaaatggatggtccaataaagaaccatgctcagcaagtgccaggggcctagttttaaacaggagaagctgaattgaatggatgatgaattgaatgaatgaattgaatccttctgatccctagtctcgcactcagactcccgtctttaagctttgttactatgaagttgtgtttgctgggacttggccactggtcagcacaggtttacccatcataaagtcttactaagtagggtagactaagaaaatctctagtctggagagaaatctgctatcagcaaaagaacccatgcctgtgctcttttcaagcacaaacgggtgctgggtagggcacagcgattcaaagacagcgcatggagtggtgcattctcaaacttcctggaacaagtgaggttctcgatgaggaactcattcatatcatcaaaataccaaagactcaaagttttttaataaggcaggaactattgaggtcatttaccccttcttgtcatggatgaggaaactgaggctcagtgaggttaggtaactgctcattaccaaggcctactctgaggttctttgttacactactctccttctcccacctggtctcatcaaaagcccagacggagtcagaaatagaactgcagggtcctgctttctagccagcagctggccacaggctatcatgcattacatggaatgtgcttcaggacgtgaggacaagagatatgaacgagaatgcagttccagtggtaacataccatcttcttccctggatttatttcaatcctgaaaacatttgtaggtattgttattcctttatttttttaaatttcctctttctactctaaataaatgggctttcatctgcagggactggagggaccaaatatccagaatatccagtccgctaaggccatgaacttttccttcccctctgttcctattttgggagtcattgctttgtttttttgacttttttttttttaacatggaaaagcattcttttaaagttgacccttttgctgcagggcaaatgcttttctgttatgcactagagattcagtttgatctcctagaaatgcttagcacaggagtcataaattgaaatgttttcagagaaggagctttctcattaagagctttccaacaggcctcttctaaatactgacacgggttggtaccagaagcccatcacctttttggaaatcaaggctacatagcaacctggttatcctcctccagtctgattgcacgagggctacaccccatgtatacagagcagagagacagctccttgccttgtgagaaattcgtcttcataaccaactcccacaccaaatgagtaaggaattggatccaaaagatagtcatgaaagatattccagaatccaaatcatgtgttttaaccactttgcaactaagatttactatcttgcctcattgttaacagaataaaaaatgcaggagataatgattaaacttctttcctccctagaatttcatcttcagtgtttgatcatcattgttcctgtcacttatacatatcaagtatcttcatctaagggtcatcaagaacctctggttgcctggaggccagaattattattcacattttacagatgggttagcaatcacagaaagagaacatgctttgacttacctaaaagagtctctgagagagtggagaatgaatgttcccacagtcttttacagagccctgacttcagtgtgagtagattagatttgctctatgtagcttacacagagacttctacaggctcaatcccataacaatgaaaatcctcaaaaatgaaaatattttcaaagctcagttcacgtatttgatttttgtatttgcattggaattaaccaaattccagacaatgaagttatactgctttggcaggtctaaatatcacaatcatcaaaaaggagagagagggagtgagcacctcaatttttagaacttcctcttaaagtgaacatagagaaggttcacttatctgtttcctaaccaattaggtcatcttgcaggaaatcaccttttcttaaaagccagtaggcagattcctcctactttaaatttcccatcaacagcattaacaatcatttatgccagccctctcacaggaatgcttgaaagtcaaaagacataagagaccactaagttttctagtttaaaataaggtcacaactttatagtaacttacagtttccctacctccctctctcaagtgattctatcactgcaatcacccttcaattgctttcctatacttgaggccctattaagtaaactatctttccaatccttgccagatttttaattctacaaccagagaggatcagttccaggccacctgacttgcgtgaatccagctgctgggccagttgagtgagattaagtaacttgctgagccagagtatgtgctgtctttctggaaaccccttgccctgggttatcactgtacatcagaacagaggaagccaagtatggagcctgagtgacatgcagagctcagatgagtgataagatcctcatgacacacttccatcggtatcctcccagagatgggcctttgagctctcaagactcttgtgggctggcagaataacacgttatttgacatgagagacatgataagcccagagaaagctaattggagtagtggttaaaactcagttggcctggtttcgaaccctggctgtgtcagtaactaaccatgtgaactggagtgacttagtttctcatagcctcattctgtcaatagggatgttaatattactcacttcataggattgttgtaaggatcaaaagagatgtagctaagatatgaagctcagcaagatttaagcttacatagtgcctagcacatagtaccttaaaaaatattgcctttccaccttgggcaacatagtgagaccctgtctctacagaaaaataaaaataagttagccaatcattgtggcatgtgcctgtggtcccagctactcggtaggctgaggtgggaggattgcttgagcatgggaattcaaggttacagtgagctatgatcatactactgcattccagcctgggcaataagggagaccctttctctaaaaaaaaatttaaaaattgcctttcattatcattaactttcaaggccttgctgttattacttttatggtggattaatatttgtaagaactcctaaaaatacaaatggatatttttaaagtctatagtagactacagtcaagcttgctcactcagggtttcctttggaaacttttctgtggtcatctgtactcatggcccttacttaagacttgggtttacctgtccagaaaacaaccaaatacatgggtacttttttatactattcttattgttttagcgacgcggagtcctttaaatagttgctcctggcccaaatgtggctccaatctctgaagacatcctgtgtcttcctttagacccgagaaactcctacagtttatccccaaaaaaaaaaaaaaaaaaaaaaagtttgagtgcttaactagcaactcctaattattcacatgtagctttttcttgacaaactttagagcttagcctcccttgatcccatcacttagcaggcatctaagcaactaatttctagagtttacttgaaaaatgtaaacctgttaattttagctaagcaagatagaattaaggatgtaaatctgctgccaaaacaaggatacaatatgattcaaaatttagtggaaataactttttaattagtcatttagtcagtattataagcatcctctgtgtctcagaccttgtgttaagtaactcaggcatgctgacatacatcaggcgtgggtttggcctctttataatatacagtcatatgtcacttaacaatgaagatgggttctgagaaatgcatcattaagcaattttgacattgtgtgaacatcatagaatgtatttacacaaactgagatggtatagcctactacaaacccaggctgtatagtatagcccattgctcctagtctacagacccattcagcatgttgctgtactgaatactataggcaattggaacacagtagtaagtatttgtgtatctaaacacatctaaacagaaaaggtacaataaaaatggtaaaaggattaaaaatggtacacctgtgtagggcacttactatgactgcagcttataggactggagttgctctgggtccgttggtgagtgcacctactgatgaatgaacatgaaggcctaggacactgctgtacactactgtagacttcataaaccccgtatccttaggctatattcattgatagagacatttttctttcttcaataataaattaacctttgattactatcacttttttacttcataaatgttttaattttttaactttttgatcttgtaataacataactgaaaatacaaacattgcatagctgttcaaaaacattttctttatatccttattctataatcttatttctgttttttagatttttttacctttttaaacttttttgttaaaaattaagacacagacacacacattagcctaggactacacaggatcaatatcatcaatatcactgtcttccacccgcccatcttgtctcactggaaagtcttcaggggcaataacacgcatgaagctgtcatctcctatgataacaatgccttcttctgcaatacctcctgaaggatcttcctgaggctgttttacagttaacttcttaaaataagtagaatatactctaaaatcatgattaaaaaaagtatagtaagtacatagtacataaaagtatagtaaatacattaaaagtatagtaaatacataaactacataaaagtatatatagtaaatacatcaatatagatatgataaaaagtatagtaaatacataaaagtgtagtaactacataactggtttttgtatttactaaactggttattataagtagaatagactctaaaatattgataaaaagtatagtaaatacatataataagatcaagtattatgtactatgcataactgtatgtgctatacttttatacagctgagattatagtaggtttatttaccctgcatcaccacaagcatgtgagtatgcattgtgctatgatgttaccattgctgtgacatcactaggtgataggaatttattagctgcatgataatgttatggggccactgtcatatttgcagtctgtcatttgctgaaacatcattgtgcagagcacgactctgtattaaaggtgataagaaaagcacacaaataatataccacaggtagaaaatgattgtaatatgagacagtaaaataaagtattatagaagtttacaggaggaagacattatttctgtgaagattagagaaattggcacataggaagtagcattgaaggcagagtagatttgggacatgtgaacataggggagttccagatgagggagggacatgggaaataagtgattaagtaggaacacagttgtgggaaatggagcagggggaagaagtctggaagggcaggtgggcgcagggtagaaagtccttgaatgccagtgttaggaatttagaattctctgaagacacttgggagccactgaaaggttttgagcctgctggttgtaaatgggagggtggtgtgcttaggtgtgtgcttggaggaggttaatcaggtagtaaaacagagggtggctttagtagggagaaagcgacagcagcacagacaacaggcaactaaagcagtcacaccaggtgaaagctaatgtgggtctaaggttgatttaggaggaatggagagtcaggaatggatctaagggtgaggtaggagaaatgaatggatggatataggtaggattttacagttaaatcagtaagacctctcaatttattgcaagtgagaagcatgagagaaggaaacattttgaaaatggagctgaggttttaaaccagattaactggagggtcaaaggaaggaacagagatggagtagatttatatgggaaaatatgagcttgctttgatgatactgaatttgcagtgctaaaatttatgatgtaggcttgcagttcttgtggttaaaagtggaagacaagtgttgagacaagccaaaggttgcgacaaaggcgtagaaaccatccaccttgtcaaatgggctctcatccttttcaaagtggagccatgccatgtagagcagacactgcaagcttgatgggaatgaggcatatctggctcaaaagcatgtttatttgtgtgtttttaaaagtgtaaatattgaaccaacattttaaaatcaggaaattatacttaaaaagcattgatttctggcttccgttttaaaaatcaaaattgcgctttaaagttagcgcaattaaaaaatcatatcactatgatttttaaaaatcaaaagatgtgattataaaagttttttacaattttaaaataaataaataagatgtgactaactatgaactcacattgccacatgacaacagctagagctgaacagagactgcccccttgagatcctggatgaattctcgaactcaccacagtactcaccacttcccctcatctcctaaggctttaattgaaagtcagttactaaatctatagagaaaaaaaaaataggttaatggttgccaagagctggaggtgggcagggaatgaggtgttggggactgatggccagtgggtgtgggatttctttttaggggtttgaaatgttctaaagttaattgtggtaatggctgaacatctctgtgaatatagaaaaagctgctgaactgtacacttgaaattggaggaggtatgatagcaaattatctcaatagagctgtttttctaaaatgcaaatatagttgctattgcccttgcagtgttgattttcttatagtagaaaatatttttctataagtctatttctatcaaaaaggggaaaatgaaaagttagactgagagggttgtgaatttcaagagaaatggtaaagactatatctcttagtgggggtgaagaagttctacatgttaatatgcaagcacttggcctctttactaatgtacattattttcctggatactgaaagcatctggtattagacaagaaaaaatgtggtcatgccccactccctaaggtccacccacaactaagaagaaagagaaaacaaaggcagaaaaaggaaaggagtaatcaacatggtaaaaggagaagcagaagaggccagtagattggatgccaaggaagggggaagctttatcaactgctgacaagaggtcaaggaggatgaggccagggaagtcaggaggtcatgggagaccatccagtgaggaggctgagagaggtgaagccagagagagatgcagaggcagctgacaaagtgctcagagtgcattgtttaggagatagtatttaatctcaggcatgaaggactactgaaggcattttaagtaggggaatgatgtgatcagatcggaacaatctagattatttgttttcacattaatttgtgcatattttgaattgtgtgcataatgaactgaggttaccccaaattttattctttcttacactaaattctctttcaatctgatatccccaggcttgttgagaccttggttattgatttccatctcattcattcctgttcctgcttgaaccaggaaatagatatatatggttggtgttatctgacccaggggttctcaacttcagcactgctgtattttgggctggataattctttgttgtaggatgctgtcctatgcattataaaatggttagcagcatcaccagcctctaccctctagatgccagtaacactgcgagttagacattgccaataaaatcaccctccagccaagaaccactgaactacatttgtctgttgcagcatttgggcccaggtgcttaaggccatgtgcagttagtagaccaccctgaaaggtgtctgccctggaaaaaaaaagaccaattcctactccacactgaggcgtacaaatcagatgatgtagtaaggggacaacggatgacacattcaaggcctcattttgttttagctaattcagtggacttcaacctctatgtagtctcctcatagaaaaaagatcgcatctggaggcaacaaggcacactaaatgtccaactgtgccctcctaaggttaggattcctgtcatggcctagggccaaagttggttcagaggaggccttgggcacagggcacaggggttcagaggaggcctcgggcacagggcacaggggttcagaggaggccttgggatgtgctggacatgatagtgggagctggcttctatgcagcaggacttgttggcttgccttcaagggggaaggagcaggtagggaacagaaagggttttctcatggtgatatcaagaagggtcagtaaagctttggagatgtaagatgcaatttggaggaggctaggaactcagatagagtttacttcagaccctcttccttataggaaagtcttagaaggtaaaggaatgtttctcttggaatagggatgtctaaaacagcttacctatgaaatgctgagatcttctagattcctttttttgcgttgtgtatacgggggggtgggaggaccagggaattttacatgtatatgccaccatttctatattgatagggaaaattgagttaagactcttgtctagctaaaaatgtctaacaactctattaaactaagactatttcataactggttcttattctgtggagtagcattatgccttagatattgaatggctagatttactagtagcaatggctctgagctatcttgcaatgcaacctctttttgatatataactctgttattatttggcccagtggtggtcactttcaccaaggctgaaggaaacccctgctggtttttagtctcatattccttaacccctctcctacttcactgattcctcaagttctgtggtaatgaactgagcctccgagtactctctggactactggcaatgagtaatgtctggacttcatgtgaaatgccatctcaagaaagggcatctgaaagcgtgcttttaccatttcatttcaggcacttctggatccagctgtgtgatagccgcactaggaaatacctggagtcacagtgtgaatacccggctgatcctccagtaccttgattcagagagaagacaggtgggtgctttgacagtattctctgactatgaaggtcggggaatgagatataccaagcaatctgagcgtcttctgaaaatgctggccgcattgtctgtcctgagccagcagcagctattagggcataaagaaaccagcatttctgcttgtcccaacaacagttataataaagtggggagacaagtcacacacaggaaaaaacataagaattgatcccacagagtcagcatttctctgatatttgtaagtgaccaaggaccacacctctaagggtatccaattctctatctctaaatgatcatttcacttagattgtatttgttgaggactaatttgtatatgaattaaataatgatgatgctttttcttgaagtatgtgtactttgaaaatcttaggccagcagatgctgccaagtgaataaattattccccagatactaggtacttttacattaacgcatacacctgtagtgtaaagtactgaatgatgctagaaagacctccaaatggttggtcactttctcagagttccctatttgtggtttctatcctggccaaaactgaaaatccttcccttacatccagaaagtttactttctacctccttttaagtcttctgtcttcattcttcattccaaagaaaaggacaccactgtctgacctctttggtaaagctttggtaaaatgtttcataataaaaaaattctttttcctaatgactaacctcaactttatcctgctgtgtgaccagattcaatctagtttctcctaaaagcaggaggaagaagacgggtgattattttgattttttggataggacagaattcagaagccagatttgcccaccttgctaaatatatatcaaatccaggccatttagatacagaggcatgaaatgtcacactggtgatcctttctggagaaaatggcagaaaagctgttgttgcctttacctgcattaggtaaactggctctttttcaaggaagcaggaatcatcaaaaacaggcgtgagctattgcctgttctagacataattttccaaaccagagaattcttcttggtttgctttggactatgtaaataatattccagcttggtgatcacgtcagccatgtcctgagaagatagagctgcttgtttctattcagggaaacattcttgagttttcaggccctggactactcattacctcaatggcaccttttccctgaagagtctggtatcctaggttctgaagctgttatttctctttttagtggaacacattccaaaatattcctggggaatctaatgacctttggtagtaaatcatgttaaatagctgtgttgcagctttcagggatatcattaaggattgttgaacacacctatgtaaactttatcagaggaagcaaaattccttgtgaatcaatgttgagtcattcgttttcatggatccttgatcccactccttgaaaacttatagtttatctctgtttcaggttttagattttagaagccattcttactgttacacacggaatttatgatttcatctattatatatggtatcatgggttcaaggctcccaaatcctagttttactaattccagttagaatttataagtgaataaagaaattagagccatatttttacttttcttttgttttaataaattaaccagtcagtgtcaacaggaagtagctggtaggacaaatgctattttttatgtctctttggtgactggaggatgttggtggctcttggcttttggctgataaggtcaaatgcaggccagtggtcataaggagaaccaggagcaaagtgtagatggatcagtgacagttcatcaactcccatcccattagatgggtcagtcatgttatcttaatttacaaaagacaacttgttactatcattactaatcaataagaagcagacttaaatgccttggaatcatgttttcaaacaataattagaaattaatgtaaaatatggccagtgttaaaatggccaacccaggcaaagaacatacatttaattaatctatagaaatatgcatgcctttggggaccagttgttaaatttgtgacctaataactagaataaagtttgatatagaaaaaacatgtctctgtctagtgaccttatcttgccttagcagagggtgtgcttagtgattccctgagtctttcctgtggtcttattttatgaaaaaccatagaagccatacgaagcgaaggcttttctgggatatgtgcataaaacagtactttaaagctaacctttaaggtaattgcaccaagtagtactttcttataacaccatttagtagcagaacgtgcctggataattctagggtagtaagacctctgggacaccagccacttagagaagataacaggtatagttttttgttttttagggttttttttccaatgcccaagcagaggccactacacccagggatcaaggttatgggatgaggattatattttatcccgtttctatgacattgagctctacaccagggctcttgaatgtaaggcttagtttcagatcacaggcctggaagggggtcaggtcaagctgagcagaccttcaagccgattaacccaagagctgaattgtgttgtctgagggaaggagtcctccctggctgattattttctttacaccctggaaactttgcaaaattttataaccaagaaagaaatcttatcagggccacaagccaagttaattttcttgcttattctgcttcagtgtttgcaaaaactctcttaagaagctggaaaacattttcttttggactaatttagctttttttccatttgacttttatttactcttttcctactctgcttcaatcctgccccaccctttttgcaacatttttattcttaccaaagacatgttcttagagtagaattaaaatggcctctcctactttttgtagttgttgttgttttaaaccatcgaaaatatgttttggtctaccccgtgcatggtatggggatataaagaagtagaagactagttcctgccctcgaggtccaaacaaactaatactgaggtactgttacaaggcagtgtttgatttgttgtctaatgagtggttaaaacagtaactgctttgactctaaaggaaggtaacatcatcagaggcatattaagtcttttcaggaaaaggtgagacttgagtattaccttaaaatcagtgattctcggcaggacgcagtggctcatgcctgtaatcccagcacttttgggaggccaaggtgggtgaatcgcctcaggtcaggagttcgagaccagcctgaccaacatggtaaaaccccatctctactaaaaaaaaaaaaaaaaaaaaaaaatagccaggcgtggtggcgcatacctgtagtcccagctacccaggaggctgaggtaggagaatcacttgaacccaggaggcaaaggttacagtgagtagagagtgtgccactgcactcaagcctgggtgacagagcaagactctgtctcaaaaaaaaaaaaaaaaaaaaaaaaaaaatcagtggttctcaaacctggctgcacttaaggctcatcacaggagcatttataccaatgccaatgccccaccctgaccagttaaatcaaaatctctgccagtagagctgagcatcagtgtttattttatttgtaaagctcccccatgtgattctaatgtgcagccaaggttgggaacctctgccttaaataatagataagattcaggtagtcagaaaggggaggtgctggggtagagtgagctgcagctgaagaacaaacaggaggataggctgcatcgtcagagggcacaggctgggttttgccttgtaacaagagcagagggtttgggcactcattcatttgacaaacctttatttaatcacctcttctctgctagtcactgtgtaactagttgcgctggagattcaagaaaacaaaaacaggtaagagatggttgataccctctggttgttcacagtctacttgaggaaacagataagcatgtaaaccggacttgcagtaagagcacagtgaatgaagtaagtctagaggagatggggggtcctggcactaaggaaggttctctagcgatgaatgaggcagagcatgaggcagagaggagtggccgaggccttcacttgggaaactcttgctattacaaagtgccttctagcgagggctggaaaagctagagtaaggctggttatacttgaaagaaggaagaaaaactcgataaaaatattcacatttatacaatttctcctcaaatcctcatgaagtctggtcttacaaactacaaatgggattatataaattttcaagtgccctagaaagagtaatgaagtaaatgaatcctgactaagcctcacacccccttgatgaaataaatattatgactctcttatttcaacaaattggaaagaggtctttttttcatataggaggtttatttaaatgaactttctaataatattttcatttctatttaggaggcaccctgaaattatgggatgcttgaggggcgagcctgaagtacctagtaaattgttgacagaaccaatatcactcaagctgctgatccacacttgaatctgtaggcttttctcaaagtcctagttttgcatcttagaagtattgcatcttggaagtatttctttgcatcttggaaatattcaatgtttcctttctggtgataggattctcagtgtccattttatattttcgaagactcaaatatcatcactgtgaagacttccctgacaccagctgtgatccgtccctcttccctctggcccacacttgcacctggcccttgtctctattcttagacttctgagccctgaattatgagccccttgaggtctataactgaatttatctgcataccctcaaatgtaagggcagtgcttgacacttacacagtagatacatttattttgaaagagagagagaaagcaagaaaaagaaatgcactccctgtagctactcgtgaacccagtctgaaggacgaaggactgcttatttagaatcattcttccgcatagaaattgagttttacaatttaaccattcctttaaaatgttagtaattgtcggtttaaaatgttagcatcaaaccttgacaattataagcagatacttaaatagaaatactgtaagaatactgaagataggaatactttttgcagaaccagcctgctgtagtctatgggaggatgggagtcaggcttcccctggaatcttatgggatagcctttgtgtaagcaagccagaaccctaaacacagacccaggctgagggagagaagggttctgcagctgctttcagggaccagatagcatgaggagggtaggaaatctttgttgctatcttctacaagtcttaacttctcctctctgtggttggacaggcttaatgaaagactgaataaccaaagaaaagttgataaattttttttcccagataagctaaagggtagatgtggggcagcatgtcaggcttatattcatattcacccaaagaaagatatcgaggatgatgttttacctgatgtaagtcatagttgtatatctccctactcctagattcctccaaagaaggattcaggcttagttgccctaactcaaaaggaacctctctcccttggtggcatggttccaggtcgctgtacttgttctcttgttttctactccagctcacctgctgtttttaggcaaggaggattatgtgagtatgtgtgtgtgtgactagatcccgccagaggagaagttcggctgtgctgcaggggtagatgaaaactctttttaagcataaatacctatagaaatagcaaagggaacataaaatccagtcaagtacattatcttgggtataaatgtctcctccctttccagagctgctcaagtgtgaaatccaagcccctgcccacactcttgcaacagaagtgctctaacaggtattaagtggattggggaaataaataaaaggggaacccagaatggtggcattaaaagaatcccttttttcaggcaatgtattggcactaggcactaggcaaatgtattaaaatctgaggaaatcctacggaaagtgtgtggtcccagtgaatgaatacaatgagctgctactcacagtgcagggactgagaaagggcaacacagacacccaagtggtcatctcccatttccatctccacatttgagataagaatacctgtatctttcctaccacccacaaacaaacaagcaaaccatgggactccctttgaaaaaagtcaatatatccaagaaatcactatttctgaatgagctcaagtagagagaactttctcttaagagggttccgctggaaattgccagctgaaaatacacaggtacaatgactcccacgctggagatgaagggtcccctttcccatgctttgaccacgatagaccgtgtacctttgctaaggtggagagtcagtctttcctaggagattttgagccaaataaaataaaaacaaaacacgggtgagagaaccaccatgatgttttaaaaggcgaaagatttacgcgatttgaagagaaaccagagtataccaccatgatgttttaaacatcattttttatcaaatatagttacaaaattaaccgttaccaccatttcaaaaaggtaaaggcactttaacaccaaaaagtagaaaggacatatctagaaggaagaatacatgtattgatatatttaaactgaaaacatttctttttatggcagacttagcacatgtccttacttctctctttgaggcgcatgagctctgaccatcacaggacaaatgactggtcctcttacagagcatgtaggtggtttaccctttaatgagccactcatttcactagcattttatcacctctgttgttctcctccagctctgacttattttatttttatatgctgtttgtctggtaccaattccccttgtgcagtgaccctgcctgctctaacttgctaagtaaactaggccaaatacctgggcaggagatttctagagaaatctgagcagttgcaggaagtagaagagacacagggctttggaaccaaattgaagaccctgttgtctggcttgggaagaaaaatattttcagttgggaaacaacatcggaaacagctatgagatctcttggacaaggcgctgccctgaaagtcaaggaccttgaaatttatttggctcatttgagaatgaagattggacaggatgttttattttagccttagctggttagctgtgagtgagaagaaaatgggcaacctcattggctagggaaagtaaaaaggaaagaagggttcaatacctgcctaaactatgaactgatttacaaatgaatcagcactttcactagaacaaaaagcatttagaatatgacagtgcccatctgagatacagtctagagatcatcttctccagtgagtctcaagtacagtaaatttaaaaatcccaggtgtttgtgaacaatgaagatcccaggccccatccccagtgctgtattcagtgagggcagtgccaagcctaggatctgcggtttttagcaagcactttgggtgattcttacatgggtgttcttcagtttcatactccattctagcccctttgttttacagatggcggtaagcaattgatattaactaatttattcagggtcacacaactagtaggtagcagaaatggaacagaaattcaattctttcaattctgaatgtgttgctattttcactttactctggtgacttttagtagatagattctaggcaaaaaagtccccaaacccaatcaaattattgggtttgcaggtgatatatttatatctctcatgactttcagtggtttataaagagctcctaaagaactgtgcaggaaaaaaaaaaaatttaagcaccatctcaccccacattgcaatcaattacaagataaaagtcatcttttaaattcttgaacccaaatctgaatatgtggctttttccaagttaaacttcacagtgagcatgaactccccagtcaagtgactttccttatagacaacatcctgccacagggctggctatgctaccgctctcctacagacagccatttgtgctcatggacatctcccttaaatcctggcttcctagtccccatcttcataggctaaaggtgtgtaatgggagaaccaactttgtctgatcttgcgagcatgggagctttttggttatcacatttttgagtcagtcaatctttattttgaaaaagcagggcaggacagagggaggaagagaggctgagggcaggcagcagcctgtgtgggaacccatttcctgccatcctagggtcccatagttgataatggacaacatccttgcttggttcttgtgcaccaggtgatactaatttaaattcctctttattttctagtgatggaaaggagttagcctttactgagtacctatgagtttgcagggatcatttttgaccctttgtgttttatttccatcaattcctccaataacccttcagcatagatctgatcatctctatttttacaaatagaagaacttagctgataacataaataactcatattcagtgatagcatcaatatttgaaaccaagtttgtatagttccagaccctcagttctttttcctgtaccatgtgctctgagatgtaagatggtggttgtgttaccggaaagggatctcaatccagaccccaagagagggttcttggacctcatgcaagaaagaatttggggtgagtccataaagagtctactttgtgccagagttcataaagtgaaagcaagtttattaagaaagtaaaggaataaagtatggctactccacagcacagcaacccgaagagctgctggctcgctatttttatgggttttttttttattatatgctaaacaagaagtggattattcatgagttttcctgtaaagaggtgggcaattcccagaactgggcgttcctcccctttttagaccatatacggtaacttcctgatgttgtcatgccatttgtaaactgtcatgatgttggtgggagtgtcttttaacatgctaatgcattataattagcgtataatgagcagtgaggacaccagagatcatgttcatcatcatcttggattggtgggctttggccaacttctttactgcaacctgctttatcagcaatgtctttgtgacctgtatcttttctgacctcctatctcatgctgtgacttggaatgcctaacctcctgggaatacagaccaataggtctcagccttatttttacagcttgttttcaagacggagtcactctggttcaaatgcctctgacagttatcactgttttaatttaggaataaaatgaggtgctagaaaaggaggccttgacttggtgatgattctgctgggttgcaatgaatggtccttattatcttcctctctgactttcctgaacgatgattagacctagaatgtcatttggtttacctgtaaaacttagtgagttatgtattaggatagcccctcccaccctggggcaggaacatgaaagcagtgagatgaggagcttcttcttgctttttttctcttgctctaggcattatttgactttgaaatactcctggcattttcctgtgattctgaagtgccccttcctctgcttgtgtgtgtgagatttgaaagcttatcacacatgtggctaaagcaggtccagcttggagcattcgtcttctggctgctgttgctgggggagtatccctgctgtgagatgctacgccgcctgagcctgtggcctctgcttatctcctggggtggctgtggctgtgaggtgcacagcatggtacaatgctagttttcatttcaagtcctttcttgatgtcactgatgggtgcaatgagtggagtggggggacctcaggcccttccaaattctttcttttttgttgttgttatttagtttttatttcataatcataaacttaactctgcaatccatctaggcatgggagggaacaaggaaaacatggaacccaaagggaactgcagcgagagcacaaagattctaggatactgcgagcaaacggggtggaggggtgctctcctgagctacggaaggaatggtctggtggttaagataaaacacaagtcaaacttattcgagttgtccacagtcagcaatggtgatcttcttgctggtcttgccattcctggacccaaagcactccatgcctccacaatattcgtgccttctttcactttgccaaagagcacgtgcttgccatccaaccactcactcttggcagtgcagatgaaaaactgggaaccatttgtgttgggtccagcatttgccatggacaagatgccaggacctgtatgctttaggatgaagttctcatcttcaaatttctccgtgtagatggacttgccaccagtgccattatggtgacttcacagtcaccaccctgacacataaaccctggaataattctgtgaaagcaggaaaccttataaccaaatcctttctctccagtgctcggagcacgaaaattttctgctgtctttgggatcttgtctgcaaacagctcgaaggagacatggcccaagggctcgctgtcgacggcaaattcaaagaacatggtggggttgaccatggctaatagtacacggttttcctcagcggtggcgtccgcagagcacccaaattcttaatagcttataaaattaggggtagaggaggttgggtgcggcggctcacgcctgtaatcccagcactttgggaggccgaggcaggtggatcacgaggtcaggagtttgagcccagcctggccaaggtggtgaaaccccgtctctactaaaaatacaaaaattagccaagtatggtggcagacacctgtaatcccagctacttgggaggctgaggcagggaattgcttgaacccgggaggtggaagttgcagtgagccaagatcgcaccactgcactccagcctgggtgacatggcgagtctccatctcaaaaaaaaaaaaaaaaaaattaggggtagaggaatgggaagcagacaaaaggtttacattgtggaggtttgaggagaaatgaatcaaataagtctctagcattctgtttgactttatgttagtctgattatgttaccataacattttatgatatgctacacattatctgatgggtgattaattttcaaatgtaatacaaatcattgagctttcctgatttctgccgctgtaaataatttggaattttcagttactgcaaagttgacatagtcactccttccttcctgtaaccttcaccttaccttgttgtcccctccctgcccccaagcttccctggatttttaaatcagccagtggctcctggcaactgtcttagaatgcttgaagccgaggttttttttcactgagggtctctttctagaagtttctcttcttaccttggcagagcttaagagttcttgcatctcagacaaagactgtgtgtgcttgactgttggacattcattttattgttacaaagggaccatgattttgagaacacctttggagagcccagctcccatggttgtatcccactgcccattttctgaatcctcaactcagaattggcaatgaaagagtgaactgggattatgatctgtgattctctaacagaattctctgagagtcaaactccagaaagaggctcatctttacaaaccttaaagaattagagctaaggcacctggtatgtctgggagggattgaaaacaatccccccaaagccccagcggccctggctctctggttgctatgctgagttgattcatccatttattgagagtctactttgtgccagttattctgctaagtgctttgtgggcattttctttttcaagcctcacgaaaactctgaggtgggtattactagatatactttacaattggagcacattgaacgttatggagtttgaaaattttgctctaaatcacatggttctaaggggcaaagccagaactttccttttcctttgcctctccctcccccatcacatacatacactccctcttttatatccctaggttcttaacctttattctacaatgagtaccatgttcatgtaagattattcatgcatgttacttggaattaattgcagaacaattttttttcaacccctgtggtgtggtcaccttcaatacttatacttggtggaatactcccttcaaagagtggaatgatccattgctttgagagagctttttcgatctctgttaagtaatgattagttatttccttataactgtgtggctctgtgtggcaacagaacacttttgaggaagaataaactctacaggacatggtcttctgaatctcaccattcaatcaggggaagttctggttcttcttctctgttccaagtactagcctttccagccagcaccttttctgtgctctgggtttggcttcagtgttctgtcatttatcgtcaaagaagaaagagaagtctctgtggcatcttgcccacagtggggacggacctgtgctcacctctctcctccagtaagaacctaagggcccaggaggtatagtggtgcctcccatagatacttcccttccctcatggatgatacagaatgacatataaatgatatctatttcttcatttttttccttgcaaagtcacttttccacatactaatccatttcacggtttatctttaaatcctttctcagttgtctattcttctctgaaagtattatcccagcatcctaatgaagattccatcaatgtctagtaaaatgacaaaactctctagcagtactatgttttgtttttggttttggtttgtttgttttgtttttactggtgcctctttataataaaaagatttggtggctccagcacagcttctaacccttcaacagctgtgcctataccaagctgttctctcttatttgtaactatttatgcagtgttctctccagatatactgttccatactgacctgcattggaatgttaggctcttctttgtgactgatctctatttcctacttgtgactccgttctgacactacctttgcctttttataccatcctccctacttttctcatgtagatttgctaaaagatccccatgactccaagatccctgtaactggctctgctgagtctgtcagcatttgatccctttgacttgaggaggccagtccttctcaggaaccacctgtaatctcttttttttccttagagacagggtcttgctgtgtcgcccaggctggaatacagtggcatgatcataactcactgcagccttgaactcctgagctcaagcaattcttccaccttagcctcccaagtagcttggactacaggcacataccaccacacctggctatttttaaaattttatgtagagatggggtcttgctgtgttgcccaggctgggcttgaattcctggtttcatgtaatcctcctgcctcagtcatccaaagggctgagattacaggcatgagccacagcacctggcctatacctataatctcagtttgaattaaacagtagtctctaggacccctctgtgtaggggatcttgttacatgttgtggttgttcaaaggccaagtattttcaaagaaaacccactgagataagttggatgagtgactgccatagcagtcaatatgacacctttgtcactttttttcatatcctaatagtctaatatttttcctcaagaaaaggtatatgctgcggtttgaatgtgtctccaaaacagcatacttaagtagtagtttacttaatggccattataaactattaaaaggtaggacctgtaagaggtgatcagcccatgagggccctgccctcatgaatgattaatgccattatcaagagaagtgggtttgttattgcaggagtaggttctttataagaagacaagttcagcccccatttgtctctctgtcaccctctctttgcccttccaccatgcaatgatgcagcaagaaggccctcaccagatgctggccccttgattttggacttagcccccagaactgtgaaaaataaatttctgttcattgtaaattatctagtctgtggtatttggttataccaggacaaaatggactaagacagaagattggtactaggagtgtggtgattgttataataaatacctgaaaatatggaagtggctttggtattgggtgatgggtaaaggctggaagaatctggagtagcaggctaacaaaagcttagattgctataaatggagtattaacagtaattctggaggactcagaagaagagaatgagaaacttcttagagattacataagtgattgtgatcagaatgttagtagaaatagagacagtaaaggccattctttttctttctttctttctttctttctttctttctttctttctttctttctttcttccttccttccttccttccttccttcctttctttctttctttctttctctctttctttctctctttctctctctctctctttctttctttctttttttgtttttgagatggagtttcactcttgttgcctgggctggagtgcaatggcacgatctcggctcaccacaacctccgcctcccaggctcaagcaattctcccacctcagcctcccgagtagctgggattacaggcgcccaccaccacacctggctaattttgtatttttttttttttggtagagacggggtttctctatgttggtcaggctggtttcgaactcccgacctcaggtgatccacccacctcagcctcccaaagtgctgggattacaggcgtgagccaccgggcctggtcagtaaaggccattctgatgaggtatcagacagaagagatgaatatcttattggaaactgaagtaaaggccatgattgttatgaagtggcaaacaacttggttgaattgcatccacgccttgaggtcttgtgaaaagcagaatttaagagcaatgaactaggatatctggtagaagaaattttaaaccatgacatcgaagaactgtgcggcttcttttaactgcatacagtaaaatgagagaagagagaaataatttaaagatgggatctataattaaaagggatctgaaggattctcagcctggttgcctggtagagaaagaaagagagcattttctggagaggaaatgtgtggctaagcaaccatttgataaggagattagtatgaatagaagaaagccagatactattcatcaagacaatgggagaatgaccccgaggggattttggagatttttaaggctgcccctcccatcacaatcccggagctctaggagggcagatggtttccagggacagacccagggtaccatccacaggctgactttccagggccactcaggacgctaccttctgcatcccagaggagcatttctctgccacccagtcatagctcaagcaggcccaggtgtgactcatgttgccactctagaggcacgagtagtaagccttggtggtgcccacatagtgctaattctgcaggcatgcagaatgtatgagctcttaggccatggtagcctccacctagatttgaaaggatatattggatagcctggacatccaggcagaaatttatcacaggggcagagccatggcagagagccccatctagggcaatgcttactggaactgtggggttgcagctgccacagagagtcccctctacacctagtataggtgtcatggcagggtcacttgagactccagaactgcagagcaaccaatgtgcagccccagcctcggacagctgaagcagcaaggctaacccgtaagagctgctgtgagggtgagactagcaaagccatggggttggagcttcccaaggtcttctgggtacaacccctgccttagtgtgaacagaaggtggaaatggagtaaaaggaggttattctggagccttatttgaggttgttttccctgttgagttttggactaacttgggatcagttactcctttcttttttatttctcccttttggaatgggaatgtctatcctatgcctttcctatcattgtattttggaggcacataacttgtttaattttataggctcacaactaacagggaatttgctttaggatgaatcatgccttgagtctcactcatatatgatttagatgagactctggactttggacttttaagttgatgctagaatgagttaacactttgcagctattgggatggaataatgtatttatatgtgagaaggacatgaatttggggggctggggccagaatgctatggtttgaacatgtcccaaaaaatacatgtgttggaaacttaatgaccattgtgatagtattaagaggtgggatctttaagaattgatttaggccataagagctcatctgtcatgaatggattaatgctgttattgtgaaagtgagtttgttatcacaggagtgagttccttataaaaatttgagttttgtttctttttcaccttctctttgcccttccaccatgggatgatgcagcaaaaaggccatggcaagatgatgtcctctcaatcttggactttccagcatacaggactatgagaaataaatttctgttcattataaattacccagtctgtggtattcagttatagcagcacaaaatggactaagacaatatgtattacaacttaaaatatttagtaataaatcttctagagactgtaattgtaataataatcctttgtgtgtcctctagccacagacacaatcctcttctaactcttccaatttttttgcattttaaattttttttaatttttactttttattgtggtaagaccacttaacatgagatctatccttttgacaaacagtctaagaacacagtaccttattaactgtatgcacattgtcatacagcagatgtctggaacttattcgcattgcataactgaaacggtgtatccattgaaagagaactccccattttccacttctcccaatccctggaaatcatcattcatcattctactctgtttctatctttttgactattttagatacctcgtaagtggactcatataatattcgttttctatgactggcttatgtcacctagcataatgtcccccaggttcatccatgttgcatatggcaggattttctttatatatatatatatatatatatatatatatatatatatatatatatatatatatataattattatactttaagttctagggtacatgtgcacaaggtgcaggtttgttacatatgtatacatgtgccatgttggtgtgctgcacccattaactcgtcatttacattaggtatatctcctaatgctgtccctccccactccccccaccccacgacaggccccagtgtgtgatcttccccttcctgtgtccaagtgttctccttgttcaattcccactatgagtgagaacatgcagtgtttggttttttgtccttgcgatagtttgctgagcatgatggtttccagcttcatccatgtccctacaaaggacatgaactcatcattttttatggctgcgtagtattccacggtgtatatgtgccacattttcttaatccagtctatcattgatggacatttgggttggttccaagtctttgctattgtgtatagtgctgcaataaacatacgtgtacatgtgtctttatagcaccatgatttataatcctttgggtatatacccagtaatgggatggctgggtcaaatggtatatctagttctagatccttgaggaatcgccacactgacttccacaatggttgaactagtttacagtcccaccaacagtgtaaaagtgttcctatttctccacatcctctccagcacctgttgtttcctgactttttaatgatcgccattctaactggtgtgagatggtatctcattgtgattttgatttgcatttctctgatggccagtggtaatgagcattttttcacgtgtctgttggctgcataaatgtcttcttttgaaaagtgtctgttcatatcctttgcccactttttgatggggtttttttcctgtaaatttgtttgagttctttgtagattgtggatattagccctttgtcagatgagtagattgcaaaaattttctcccattctgtaggttgcctgttcactctgatggtagtttcttttgctgtgcagaagctctttagtttaattagatcccatttgtcaattttggcttttgtggcccttgcttttggtttttagacatgaagtccttacccatgcctatgtcctgaatggtattgcctaggttttcttctagggtttttatggttttaggtccaacatgtaagtctttaatccatcttgaattaatttttgtacaaggtgtatggaagggatccagtttcagctttctacatatggccagccagttttcccagcaccgtttattaaatagggaatcctttccccatttcttgattttgtcaggtttgtcaaagatcagatggttgtagatgtgtggtattatttctgagggctctgttccgttccattggtctatatctctgttttggtaccagtaccatgctgttttggttactgtagctttgtggtatagtttgaagtcaggtagggtgatgcctccagctgtgttcttttggcttaggattgtcttggcaatgtgggctcttttttggttccatatgaactgtaaagtagttttttccaattctgtgaagaaagtcatcggtagctttatggggatggcattgaatctataaattaccttgggcagtatggccattttcacgatactgattcttcctatccatgagcatggaatgttcttccatttgtttgtgtcctcttttatttcattgaccagtggtttgtagttctccttgaagaggtccttcacatcccttggaagttggattcctaggtattttattctctttgaagcaattgtgaatgggaattcactcaggatttgactctcggtttgtctgttattggtgtataagaatgcttgtgatttttgcacattgattttgtatcctgagactttgctgaagttgcttatcagcttaaggagattttaggctgagacgatggggttttctacatatacaatcatatatcatctgcaaacagggacaatttgacttcctcttttcctaattgaataccctttatttctttctcctgcctgattgccctggccagaacttccaacactatgttgaataggagtggtgagagagggcatccctgtcttgtgccagttttcaaagggaatgcttccagtttttgcccattcagtatgatattggctgtgggtttgtcataaatagctcttattattttgagatatgtcccatcaatacctaatttattgagagtttttagcatgaagggctgttgaattttgtcaagggccttttctgcatctatcgatataatcatgtggtttttgtctttggttctgtttatatgctggattacgtttattgatttttgtatgttgaaccagccttgcatcctagggatgaagcccacttgatcatggtggataagctttttgatgtgctgctggattcagtttgccagtattttattgaggatttttgcatcgatgttcatcagggatattggtctaaaattctctttttttgttgtgtctctgccaggctttggtatgtggatgatgctggcctcataaaatgagttagggaggattccctctttttctattgattggaatagtttcagaaggaatggtaccagctccttcttgtacctctggtagaattcggctgtgaatccatctggtcctggactttttttggttggtaggctattaattgttgcctcaatttcagagcctgttattagtctattcagggattcaacttcttcctggtttagtcttgggagggtgtatgtgtccagaaattcatccatttcttctagattttctagtttatttgcgcagaggtgtttatagtattctctgatggtagtttgtatttctgtgggatcagtggtgatatcccctttatcattttttattgcatctatttgattcttctctcttttcttctttattagtcttgctagtggtctatcaattttgttgatcttttcaaaaaaccagctcctggattcattgattttttgaagggttttttatgtctctatctctttcagttctgctccgatcttagttatttcttgccttctgctagcttttgaatgtgttgttcttgcttctctagttcttttaattgtgatgttagggtgtcaattttagatctttcctgctttctcttgcgggcatttagtgctataaatttccctctacaccctgctttaaatgtgtcccagagattctggtatgttgtgtctttgttctcactggtttcaaagaacatctttatttctgccttcatttcgttatgtacccagtagtcattcagcagcaggttgttcagtttccatgtagttgagcggttttgagtgagtttcttaatcctgagttctagtttgattgcactgtggtctgagagacagtttgttataatttctgttcttttacatttactgagaagtgctttacttccaactatgtggtcaattttggaataagtatgatgtggtgctaagaagaatgtatattctgttgatttggggtggagagttctatagatgtctattaggtccacttggtgcagagctgagttcaattcctggatatcctagttaactttctgtctcattgatctgtctaatgttgacagtggggtgttaaagtctcccattattattgtgtgggcgtctaagtccctttgtagttctctaaggactcgctttatgaatctgggtgctcctgtattgggtgcatatatatttaggatagttagctcttcttgttgaattgatccctttaccattatgtaatgaccttctttgtctcttttgatctttgttggttgaaagtctgttttatcagagactaggattgcaactcctgcctttttttgttttccatttgcttggtagatcttcctccatccctttattttgagcctatgtgtgtctctgcatgtgagatgggtcttctgaatacagcacactgataggtcttgactctttatccaacttgccagtctgtgtcttttaattggagcatttagcccatttacatttaaggttaatattgttatgtgtgaatttgatcctgtcattatgttagctggttattttgctcattagttgatgcagtttcttcctggcatcgatggtctttacaatttggcgtgcttttgcagtggctggtaccagttattcctttccatgtttagtgtttccttcaggagctcttttagggcaggcctggtggtgacaaaatctctcagcatttgcttgtctgtaaagtattttatttttccttcacttatgaagcttagtttggctggatatgaaattctgggctgaaaattctttctttaagaatgttgaatattggcccccactctcttctagcttgtagagtttctgctgagagatcagctgttagtttgatgggcttccctttgtgggtaacctgacctttctctctggctgcccttaacattttttcctttatttcaactttggtgaatctgacaattatgtgtcttggagttgctcttcttgaggagtatctttgtggcgttctctgtatttcctgaattgaatgttggcctgccttgctaggttggagaagttctcctgggtaatatcctgcagagtgttttccaacttggttccattctccccatcactttcaggtacaccaatcagacgtagatttggtcttttcacatagtcccatatttcttggaggctttgttcatttctttttattcttttttctctaaacttctcttcttgctttatttcattcatttgatcttcaatcgctgataccctttcttccagttgatcgactcggctactgaagcttatgcattcatcacgtagttctcatgccatggttctcagctccatcaggtcatttaaggacttctctacactggttattctagttagccattcgtctaatcttttttcaaggtttttagcttctttgcgatgggcttgaacttcctcctttagctcggagaagtttgatcatctgaagccttcttctctcaactcgtcaaggtcattctccgtccagctttgttccattgctggcgaggagctgcgttcctttggagggggagaggcactctgatttttagaattttcagcttttctgctctgttttttccccatctttgtggttttatctacttttggtctttgatgatggtgatgtacagatggggttttggtgtggatgttctttctgtttgttagttttccttctaacaggaccctcagctgtaggtctgttggtgtttgctggatgtccactccagaccctgtttgcctgggtatctgcagcggaggctgcagaacactgaatattgctaaacagcaaatgttgctgcctcatcgttcctctggaagcttcgtctcacaggggtacctggccatgtgaagtgtcagtctgcccctactggggggtgcctcccagttaagctactcgggggtcagggacccacttgaggaggcagtctgtctgttctcagatctcaaactctgtgctgggagaaccactactctcttcaaaactgtcagacagggacatttaagtctgcagaggtttctgctgccttttgttcagctatgtcctgccccccagaggtggagtctacagaagcaggcaggcctccttgagctgctgtgggctccacccagtttgagcttccccgccactttgtttacctattcaagcctcagcaatggcaggtgcctctcccccagcctcgctgctgccttgcagttcaatctcagactgttgtgctagcaatgagcgaggctccatgggcatgggatcctccaagccaggcgtgcgttataatctcctggtgtgtcatttgctaagaccattggaaaagcgcagtattagggtgagagtgacctgattttccaggtgctgtcggtcacagcttcccttggctaggaaagagaattccctgaccccttgcacttcccgggtgaggcgatgcctcgccctgcttcagcttatgctcggtgggctgcacccactgtcctgcacccactgtctgacaagccccggtgagatgaacccggtacctgagttggaaatgcagaaatcacccgtcttctgcattgctcatgctgggagctgtagactggagctgttcctattcagccatcttggaaccgccccaccacattttctttatccatttatttgttgatacacctttagattgtttccataccttggctattgtaaataatgctacaatgaacatgggtgtgctgatatctctttgggataagtttacaagttttaaaatataatttcaacttttattttagattcaggaacatatgtgcaggtttgttacatgggtatgttacgagatgctgaagtttgaggtgcgaataatcccatcacccgggtagtaagcatagtaccccataggtgttgttttaaaccctttcccccatcctcctcttccccatctagttcccagtgtctattattctcatctttatgtccatgggtaccctgtacttagctcccacttataagtgagaacatgcggtatttggttttctggtcctatgttaattcacttaggataatggcctccagctgcatccatgttgctgcaaacgatatgacttcattcttttttatggctgtatatgtaccgcattttctttatccagtccaccattgatgggcacctaggttgattccatgtctttactattgtgaatagtgctgcaatgaacatctaagtacatgtggtttttggttttttttttttttttttgggagaacaatttattttcctttgggtatatacccagcaatgggattgctaagtcaaatgatagtttttaagttctttgcaaaatctccaaactgctttctacagtggctgaactatctacattcccaccaacagtgtatgagcattttcttctctccacagcctcaccagcatctgttgctttttaactttttaataaagccattctgactggtgtgagatggtatctcattgtggttttgatttacatttctctgatgattagtaattttgagcattttttcatgtatttgttggctacctgtgtatcttcttttgggaactgtctgttcatgtattttgcccattttttaatggggttatttattttttgcttgttgaattgtttaagttccttatagattctggatattagacctttgtcagatgcatagtttgtaaatattttctccaattctgtaggttgtctgtttactctgttgttagtttcttttgctgttcagaagctctttaattaggttttgtttgtcaatttttgtttttgttccatttgcttttgagggcttagtcataaattctttctcaaggccaacatcagaatggtatttcctagattttcttctaggattcttatagtttgagggcctacatttaagcatttaatccaccttgagttaatttttatatatggtaaaatgtaggggtctagttttattcttctgcctatggctacccagctatcccagcaccatgtattgactagggagtcttttccccattgcttatttttctcaactttgctgaagatcagatgactgtaggtgtgcagctttatttctgaattctctattctgttccattggtctgtatgtctatttttgtagcagtagcatggcgtttgggttactgtagcattatagtatagtttaaagtcaggtaatgtgatgcttctggctttgttatttctgcttaggattgctttgtctattcaggctgctttttggttccatgtgaattttaggacagttttttgtaattctgtgaagaattatgttggtagtttgataggaattgtgttgaatctgcaggtttctttgcacagtatggccattttaatgatattgattattctaatccatgaacatggaatgtgttttggcggggggatcctctctgatttcttttagcagttacttgtagttctccttgttgagatatttcacttccctagtttgatgtattcctaggtgttttttgttgttgtgactactgtaaatgggattgtgttcttgatttggctctgagcttgaacattattggtgtataggaatgctactaattttctgtacattgattttgtatcctgaaacttactgaagtcatttatcagctgtaggaggctttagtggagtctttagggttttctcagtatatgatcatattgtcagtaaagagggataatttgacttattgttttcttacttggatccctattatttctttcttttgcctgactgctctggctaggacttccagtactatgttgaataggagtggtgagagtgggcatctttgtcctattcctgttcttaaagagaatgcttctaacttttgcccattcagtatgatgttggctgtgggtttgttatagatgactctattttgagatatgttacttatatgcctaatttgttgaggattttttcatgaaggaatatggattttctcagaagcttccgcatctattgagatgatcatatggtttttctcttgaattctgtttatgtgatgaatcataaatatcgatttgcatatgttgaaccaaccttgcacctcagaaatgaagcttacttgatcgtggtgaattaacttttttatgtactactggatttggtttcctactgttttgttgaggattttttcacatatgtccatcagggcctgaagttttcctttttcattgtgtctttgccagattttggcttcaggctgatgctagctttgtagaacgtaactcttctatttttatctagacaagacaactaagtgttctttatgttgaacacctcccctttccctccattcctgcctcattttttcatccttcatatcctttctgggtacatatgtgtgccaaatgctgggaaaagtaagtcaaataaagctcagtttccttctatgaagagccatagtagtagaggagaatacccagtgttaatagagggaagcatacaggcaaataaatataagaaggaattgaaggaattgtggaagaggacagtgtagctatcgttgttgggatggtcagaacactcacaaggaagtgatggccagagaaggattcagaagagggtgtgatactggaaacaaaacttgaaaagtgcattggtatttgcttgatagatgaagtaggagactgaggaagatgtttgaacaaaggctctgaggtgggaactacaaatggtccttctttagtgctacaggggagcactaaatgtgtctgtacaatgagtagggatcggggaggatggggcctgtatgtagttaaagataaagtaaggaaaggaaagacaaaccagactcagtcctgcaggttttcagaagccccactaaggaacttccagcaagcctgcgacatcagatttgtaccttccaagtctccctttggcaagagttttccatacagatttggagggatttgaaataagatgcaaagaaatgagggcctgaaccaagacagtggatattgagagggaaaagagggaagagttatgagatggttaggaggcaggatccacaacatttaagcacaaagaggagatctggaagggtgtgggaagggggttgttcctgaggcaaatgagtgagtggatgaggttttactcactgaaacaggctggtaaaggagaaaaaggaggcctgggagggaggcaagagctggccctgcttggaacatgcgttgtttcctgcttacgtggacagtgtatggctgcttccattcttccatccaggcctcaatgactgccatcaagaattaggttggagatcagaaatgatttcttataattgcacagaatctttagtcaacattttgtcttcccctgcctcccaccactgtttatagcacatcatgtcatctccactctcaatgccatttccttatttcggatccctggcttctgtatagagacaatggttatcagagtgtgggaaaaatgaaaagttaagagacgccttctgcagaaagggaagatgcaaactattttcagtaaagcgcctgagctgagagaggagagggccctatggagagctatgtctccctctccactgaattctagcaaatgtaaagtccaggggagtggcatccgtagctaatttgcagaaataccagtacaggcttcaaagttttctgaaagacccacatctgcaaattgggaatcaggaatccttgctttcgtgggtcatgccagtcagtggattgtttgctctcagatccgctccctgcccttcccctgctctacttgataccacagggaactgacctttacaatttgcatttcccagtctccctttccattgagtctggttagtttggagaggagggatgaagggcagaagtatgagagaagccatgtatttttgtacacacacacacacacacacacacacacacacactctcacacacacattcctctgccttgcttccagtggtgtcccaggcagtgacattagttcctctccatgatccctttgctgtccccactctagttgggcagctccagcctctgggctctagtaacagcatctcatccttgattcctccagccctggggatggtggtagcttcttgttgttgctaatctctgggttgactcattgtcccctattttcatttcagctcttctaacacatttgtaactaattccccaaattgaatgctctctcttgaactaccaggatatgtcccattttactgatggaccttgacagataacaggtctacataagcaccctggttggtacatggttaatataagacccccaatctcttctctattgtccctgttcccccaaaggactcttctgtctaccatggttctccatccctcagagttgggctcctggcctggactgtcttgaagggcaaacatttgtgctgtgcttcctgaatggcatgagaaaaggagctcttttggcctagcctccttcctgtaggattttccaaaactttccagatgtatctaagctcaggaaacattttaatggctggaaataatgtctcatgggggttgggggtttgaaaccaacagaaccttctccaaaagaggtgtgttgaaatgttccagggtctgtatgcacacatccaaaccctgcccctcccctgttgaaagcatggcaggctcccaccctttaattggttcatgtcgtagaagagttggcattctctgaatgccctaatgacatggagcagaggaacagctccaaaggccagaactctctccaggagggaaaggattattaagcggttagtgatgtatttggattctaattcagattccacctcagattctgtaaagagactcctataaccctcttcttttgaccttatttggctagtaataatggttgtaagattgatctaaatcataataaatgttgtctaaggctgctcttactgacttaatgaattggagcattctgagttttttgtgaggataggcattatccaactgcagaatacatattgattctttttcaaacaggctgtggcttttactttgcaatgttgcccacatttcatgacaactttcagaacaaactctgttgagggatgaagattattgctatctgaatgcattcatcaaagaaaagtagaagtggaagaactatacttctgccttctcatattcttcagcattgggccaagagtagaaagtaaccatcatttcagccaggcacagtggctcacgcttgtaatcccagcactctgggaggccaaggcaggtggatcacctgaggtcacgagttcgagaccagcctggccaacatggtgaaaccccgtctctactaaaaaatacaaaaattagttgggcatggtggcggacacctgtaatcccaggtacttgggaggctgaggcaagagaatcacttgaacctgggaggtggaggttgcagtgaggcaagatcgtgccattgcattccagcctgggcaacaagagcgaaactccatctcaaaaaaaaaagaaagaaagaaagaaagaaagtaaccatcatttctagtctgtggggatcaaactccagaaattgctaaattattgcatgttctaatactacagggaacagctgaaacctcatccttttgagaactggacttgaatccaagccaatattgatttatttgggatgtgtcttgcaagtccacaaatgctttaacacagtaatcactaaccaggatacttatgtagttgtttgatgactcatagaactttatagaccttggggtcagatatatgttttatatgaaaagagcaagattttaatgaaaaggaagtaggtcatgtgcaacaatgtaactacagtttctgtgtctctgaagtgttcagttttgtatgacattgttagttctttcttctgaccaagtttccttcattagcctacaagggagcctatgaagtgaattcacagcaccagaaataacatgagaagaccataattttttaattatttcagagattaagattaatttaggccaggcacggtggctcacgcctgtaatcccagcactttgggaggccgaggtgggtggatcacgaggtcaggagatcaagaccatcctggctaacacggtgaaaccccgtctctagtaaaaaaacaaaaaattagccgggcgcggtggcaggcacctgtagtcccagctactcgggaagctgaggcaggagaatggagtgaacccgggaggaggagtttgcaatgagccaagatggcgccactgcactccagcctgggcgacagagcaagactccgtctcaaaaaaaaaaaaaaaaaaaaaaagattaatttatggattctagtatataacatacatacataaactactgtcttcatatgtgggtacctggaaaaatttttccattgcaaaaaagataatgttattctaaagtaaaattctagctctgtttctaattagatatgtgatcttggacaaatgactctgagtcacaggttcctcttctataagagaatttcatgatctagaagatgatttcactttctggttctatgaagaagaagcaatgccatgctatacctcagttactattttatacagtgggaaaagtctcattatcaacgggcgctggccacattgtttgtgctaaaccataggatataaccctaacactctgctcagttatttatttggctgacgacttcctcttgtaatacttcttgacaggtggtcagaggaatacctcttggaatccacttgcagagcttgttaaaaattcagattcctggacttcccagactaaatcagcagctttgggggtgggtctagaaatctgcatttctacattgctgggcaattcttaaagatacaaagtctgagatccatggccagtcaacagcacgtagtgttaatatattctatgatgtgaattactttaactctctttactctgcgtccagtctgcagggtcttagcccagggcctactactgactggatgatttggtcacaacctttctctctctaggactgttttcttatttatgaaatatggggtctggagtattagtctctaaggaatctttgtgttctaacagttcatgaaaatagttctctagcagcatctgagagagttactgaaactaccttaacaaatcctatttcttgagtgcctactatgtagtaggcattgtgctttttttttttttttttttttttttagctagagtctcgctctgttgctaggctggagagcagtggcgcgatttcagctcactgcaacctccgcctcctgggttcaagctattctcctaccttagcctcctgagtagctgggactacaggtgcatgccaccatgcccagctaatttttgtatttttagtagacatggggtttcaccatgttggccagcatggtctcaatctcttgagcttgtgatccgcccgcctcggcctcccaaagtgctgggattacaggcatgagccactacacccggccggtgcagcttttatgtatgtttcatttattctttatgctaacctgtgatattattattattattattattattcacacttaacacttaaggaagtggaggctgtgaaaagttaagtaacttgtccaagccgacttaatcaataagaggagctgcagtaaagtggaatgaaactggggctgtgaacacctaaagaatgacccaggttgttgctccccctgaaacttcacaaggcctgggcctcatgcagtgcactgctcattcaccctgtgttccactctcccagcaaaggagtcctggttttggtttctttcgatgtttacttggcctcttgcttaagcatttgcctttcctcctcaataacagtgaaaggactgaaaaataataaaataaagaaaagaaaatcccagggctggaaacattttgtttcctacaaaaagaatattttgcggccagctctgtggttgaaagtatttttcctgtggtctagggatgagttggatcccatctcttcttggccagggtctgagaacttagcctgtggcttcccatcgagtcagcacatagcatgctattttttgaacgagtgtctgatgatgttgaatgtgttcacgagtggacgaataggtctgtttgggtgtataagaaatgtgcgcatgtgcctctgactcttccagggcagaaggaacctgggagtggttttccacatgctatacatatcaacgtagcttttaagttttcatcactcacatgatgaccaaaaaaattcagatgctgacaaatgagaggagggtgatatgtgagccttatgtggatttgcaagtaatcagaaagccagggaatctaagattccctatcacatttctttccattttcaaatggaaaatgtcacatttctttccatttttcaaatgctcaaaaccaagacatggggttggttttattatggcagggtggtctgatggtaatgcagaagatgggaattctgagagctgccccagcttgtccaccttcagcctttgggacaccaactttgcctagccttgaataagtcactttttctcaaggactgcattttcctatatgaaaacatgaatttgtgtttaaaaaaaaaaaacaaaactttctgctttcaagaataaaagcttctctagtgagggatgaattttgaatattcaaaccgaattcatggataagaaatagtagtgctaggtaccttttctttactcataaagcattatgtactcatatttgtatgcttccagtatgactttgaagtgtatattagtgcctagaacttttcagcctgttctccatggcatggccttcatgattctatctcttacattcttgtaaagaatgaagaacgggtgttctctggactctcattgcacatggttttatgttcagttacctgctgactgcctccctgtcatgccagctgcaagtcacagcacagtgcctggcacagagcagatgcccaacttgtatttgttgacttaaataaaacttctccaaagatgacaagctactgtttgtaacttcagtattctcttgtgcgaagtcctctacatagctctccattcagggacatttctagagctcaaatcatcatgacttccaggaagaaaagttgtagtcactggattagggggcattgtttgaggaaataagcaaattccacaggtggaaagaattgtgaattgtgtgtgtgtgtgtgttttgaggtgaaagaggtttagggaaaatttgaaaagctattggaatggaaattaaaccatccagagtgttttattttagagggatagggtttaagatagactcagcagtggtggcattggccacagggctgcacctaccctgggatgcagaaactggcccatccaagtcagctccatgggaaagaatgaccacaaagtgatcaggggtcaccagtgagaaaaactggcatttgctgtattttgtcacacaggacagtagaactgttctcacagtaggagcagggatggggtggaggtggtggtggtgattttagtaaaccagttttctggtgatgggggggcatatttctgtttttaccccttaataatgagacagcaacccaaataacagatccctcagtacactgaaatgccaaggctaaatgaactggtggaactttgtggctttggctcttggcccacaggcatatccgtgcattagagccatggcttggcagtagacaaagcagctgtgtgggtcctcggggagctctctggctctgtggctttctttgatatgcaactgaactttggcaaatttttcctctcatggcactgtttatgaggtccagagaccttcattatggaacccaatgccaacagcaaactagaactacaggatgtcttcccacattcacactctgcttgcaggctgaagagttagcccacaaggctttcaacaaagggacaatttaggggaagagactgcagaattctcttctcagcttcacatggctgtaaacccataggattggccagacctcttaaactttctttccttcagaaggaaaagatctcttacttaaaaatgattctgtataagattactaatttactgatttccaattcaatagtatttaaaaacaacaacgacagtaacaataatagctagcattcatcaagtacttgaccatttgctaagtactaaagtgctgtgcatgtattaataaaaatgcatttattatcaacatctttgtaaggtaagtactattatccccattttatacatgaagaaactcaatcccaaagagattaattgttagttgttattggtcttaataattattcaccaatttaaggtataatcctgcagatatagcttataattgactggctttcctgaaccccaccttcctcagtctatgacactgggccacagatactaaaataattaaaattatcattcttaattgttaacccacctcaaactgtaactgggtcttgatgagtttcaagtagtatcatccttatattgggaaatctataattaagacttttctaaagtcatgagcaggtatacagaaagtgattgacttggtgaatgagagggatcaactatcctccagagcttgtacagtagagtggaaacaaatgtggtgttggactgagaacggtttaaggtattggaggcaatgattctgttcaagtgccaagattaaaccaatagactctagaggggctcaaaagtgaggctacatgtcatggtttgacgtctaaattatagctatgcaactttctttcctacccatttctactgtatcctctgtgctttctataatagccgctccagggaatgctgataataacattatcggctgccatttttatgccaggcacatgataagagctatacaaacatcatctttataatatgctgtgaggtgggtttttacaataacactgtgaagtgggtattactaccctgaatttacagatggaagaaatgggctatggagattatgaagtgctctgaagttaaaacaactagtaaatggtagaaaagagactctgaagtgacttgtagctactagtttgtcttgcctcataaacaatgtgatagacatctggtatttctgcttgcccttgatctcttaccccttctctcatacctacactatgattttcctgtaaggaaacatgcctcttcaatttttttcagcctatgttgtctagttagggctgagggctgattgtacccactgggttcatgtctgaccaatggaaggatcacatttcctttctacagagattggtttgcaatagttggttaacccaagctaagttgaatagagtaagcccagaattttgctgaacaataagagttgctaaattggtaggatataagcctggagctccttgtggctgtctttgccaccatatgaaggaactcacctcagaatgacaataaatcaacgtagagaaaaacaagagattgagagaatgttccaggtggaaggaggaattgaataattgaattaatataagattatgaggccatcatctgaggccctggatccaactgtgcctcaggtcagttactcctgacattccagttaagtgagccaataaattcccttttttgtttggtctcaatcacatctctgttacttgcaacagaaagaatactaaataatacacatattaagctgggtgcggtggctcatgcctgtaatcccagcactttaggaggccgaggcgggcggatcacctgcagtcaggagttcgagaccagcctgaccaacgtggtctactaaacccatctctactaaaaatacaaaattagccgggcgtggtggcacatgcctgtaattccagctactcgggaggctgaggcaggagaatcacttgacccaggaggcagaggttgtggtgagccaggattgtgctactgcactccagcctgggcaacaagagtgaaactccatctcaataaaaataataataataatacacatattagatcctcatagttacatacaaatgtgggccagaaaattctaataatgagaacctgtattgttaagttaaagagtttattcccccattaagtagagataatttctgattacttaggtctactttcctggttcctatattattccattccttttcttttcctcttccatcttatgcatttgctgttcttcttcctagtttccttttggcctttttattattcacctccaccacagtagagagaaaaaaaaaagcatgaaacttacaataaacagcttttctggcttataaggctctttgaaaagtttcagatgaagagtaagttaaaaaatattaactaaaaagcattaaacttacaataaacagcttttctggcttataaggctctttgaaaagtttcagatgaagagtaagttaaaaaatattaacttaaaagcaattacgaaatcatttttgggttttagttagccattctatccatgacctttttttttttaaaccacatattaagcttgatgaaagtccttgatgtcattgcttccacgacaaaaatacaaccttttctgggttagtttcccttaatcattaatgatgagctgtaaaatattctttccagttcaaaagtggcatcaaataagtaactaagatgaaattagtaataattttggaaatgtggtcatttagcaagctgatatttactgaacatctactgtgtactaggttaggctctggaaaaagcaaagatgaataaaacataattttcaaaatctagctggatcggcaagtctgaattgggagtgagcaggaggggcagaggtgagggctgagcctggagcagccagttggcccatactgaggaggaccttccaaaggctttggagagtagatactatagggagctgaggatggtcttcaagaagtgaaaaatgtgctaatccactggggagagcttacgggttatatacaagggtgttatttgtctgacagagaaaactcactttaagattacatgaatatatgatccatatagtctaccaggacatctcttttatatattgaccagaataatctgagaaagctggaagtacaggcatttaagccactaaagctgtggactacagttcaccctaagcaaggaagcgagtgttttttaacatgtcatctcctggattcccgaggctttctgggttagctcaaacctgggccatttagcttcttatgggcagggacctcatcatgttcatctttgctttccctaatgtctaagccagtacttggaacataggaggtactcagtaaatatttgttgaattaatataacattaaatacatcattcagttctgagtagtcattgtttatacttgctgtaaatatggttttatgtaatttccaagtgtgtctgccctttttaggtcctgtattttcattttggcatagtctgctttcagtggcacccagctagaatttgcctgctaaacagaaaatctctggtgacaccgaattgcatatcctggcttgattgctgatggagaatggcagagcacacactcttatctttagcttgactctccatgtataagagaggggatgtttttgtttgtttattctgaaatggaaaacaaaaaagtaatgcatgctagttgtgaaaaaaaaatcaagcaatatagtaggagggaaaatcctctaatggtatataatcttctaggctttttctatgcatatatcaaaatatttatgtactcaccatatataatgttatataaactactttaaaattaatccacacattatggataatttttcatgtaaatatacatattactaaccgtttttcatagcagcatagtattcatggtatggatatacaggaatgcagttaagaggataacataaaaatgaacgaaatgttgtgttccttaaaaactcatatcaggaaaatctaaagtattttcatttctaattatttttaaaaaacaacaaaactttgtttcaaaccaaagaggtagcaatatagcttcatttcagaaattgctaactccgtgcatgaatattgtagccgtgctttgcttcatcattaaccttctctaattcttctacctagggaccccaaagagcatggtaaacattttacaaagtctccttaaagatgctggtctggactgaatggatctttaaatctaactgtttttaaatgtcttttagtaaggcccaccttaattgagcttttttcttaagatcctgattttaaaggggtggatggctcagaaaactgctccagatcaccaaataaaaaatcaagttctgaacagtgagacacctttaggcccatccccccagctgtccccaagatcacactccttcatcatgtgtctcctgagagtcagagatcctgcagctgtgcctgaggaggactgaggtctccaggctcttgtattgctaaacctagtttttgtttttgttttgtttccattctcttttttcttgcctttttttcctctgtggtgtctcatttctcctagagtcccggctgactcccctggggatgaatctgcctgcctgtgcatacaggaatccacagtgtcattagggtagttatctctaatttattcttcctccttgtgattagaagaactcggtctgaatattgaagaaaactcatgtgggctcttgtctttgtgataaaagcttctgtcccatagtaattaggcagagctctagtttacttctaaaacatgattaactccttggaaaggaggggaaaaaacggaaagttatttaagatgggtaccctaggggaacaaaggagaggcttttcccattgttatgcctcctaattaggccaagcccaaggttgctgtgtgtcattccaggaggcagtggcctgcctggtaggcggataggagcagaggggtgacagaatgaagctgacatcagaaaggcccaaaaagagcttagggcttttttttttttttttttttttttttaagatggagtttcactcttgttacccagactggagtgcaatggcacgatctctgctcactgcaacgtccacctcccgggttcaaacatttcttctgcctcagcgtctcgagtagctgggaatacccaagtgcaccaccacacccagctaatttttgtatttttagtagagacggggtttcgccctgttgaccaggctggtctcgaactcctgacctcaggtgatccacccgccttggccgcccgaagtgctgggattataggcgtgaaccaccacgcctggccaggactttttaaaagactatatcttctgaacttgcctcctgttccacctctgaagggccctcggggagagacggagcttagataccacactctgttctgtagttcctcacatagtttttctcactcagaaccactgaaagaggttaggttgctttattcctcatgactctctgttttgcttgacttgtttatggtgaacatgtggtatttacataatcagaaaaacataaagccatattcatagtgtaccaaccgggaaagagagagaaaaattaattgtttgttgggactggcaaatagtctcacagtgtagtcaagtcaacattaacagtaagaagggtatatgggattatgaaactgtaaaaggcccctgaggattctgagcagagttcattcttagcatgactgtgggggctcagtgccaggccatgctgcaccccacagagggccctgtccagacttctcagcacagggaatgcctcatattggacagtttttgactcctgtgatggtcagtattctcagcttcagggccctctgtttcaggcaagataacctattcactcattctatagaatgctcagcctgatggtatgtgtgttaagtaggtagactgcctggaaacacagattgagcaccaacaaatgattctaatgagaattttagaattttaaactccttatatatccagtctggttgctatcaagctcttcctaccaagttctttctgagatccttctggtgcctatacctgtttcttgaattatttcagtctgtgagcttatttctatgaattaaagataccttaattcccttataatagttgataagtgagtcattctatggttatatatagtgtaagatttagaaacattcacattaaaaatattgaaaatacaaaagacgaagctgacaggttcctggttataccctgacagcactggggagagttattgtataaagttctagctctcctccatcttactgaaactaatttcgtttgtgcttaaaggaaaagacaggaagggtgccctgttgtctctctgttacactcttcaactcatctgaaatcctgtcttgtgttttcttcttgtcctttgcccttgcatttgctggaggaggactttagggaaatagtaagaatgctgcggtaacagagagaattaatttgaccgtgctctgaagaaagagcatgttgatttctcactagaattggttcctccacccatcagagcagggccagggatgtggtacattacacaaaccagtcccatttgaccagctgtttttggatgtgtcaagcccagatttcagcccctttacatagaaacatgttgccttccttgaatgggttcctgtgagactaaagaaagtcccgtgtggtccaagcatgatgtaacagggatgtgtgcttcagaattcaagacacaccctctgagttcctggcatctttttactatagtaatcacacagccatagtcttccttctgtgacccttgaaggccagagctgccttgcctctgctgcattttctaatgggcctggacaggaggacccagctctgtttcttatgggtcttgtggatggcgctgggaaatcaggcttgcctaactggatatacagagcttagcattaacagctggacagagctcttgtgcatcttgttttttttggttatttaaatactcctgatttagggtggagaaagggaatggatttctgttgcttgaaattccttgcgacagtatttgtttgctttaattggcgctagattgaagttaccaaattcagatgatgatgaaaccagttcacacttatttgaaaattgaaattggtgatacttatgttaacttttgattttttaaaaaaacaataaaaaataaaatttaaatgtagtatttgatggcgatgagcttactgacaataaagtcaattctcacttccttcagcatacccaatggtaatattaaacaaatggtaacattaacaattttagaaatggttagaaatatgtacagttctgtagcatgtgtgtgaagttgtacattagccttgcacacataggcactctcacatggacagcaaggaaaggcagaccattgaactaactctttagcctttaaaatggggcaagttactaacttttctgcaatttttatccccataagattctctcatcatagtggaaagaaactaatatttctcaggttcctatgacgtaccgcatttttcactaatttctttcatctctttaatcctcacaataagcctatgagatgagtgctattgtgttcattttagagatgaggaaagtaagtcttgaagaggttagagtacccaaaatcatatagccaagatttgaagccatgcttgaccagatctaaggtgtgttacattttgtaataatgatgattgtacttgaccccaagcctcctttttttagccccctataaccatgacttgataatagctaaaaaattgtattgagtagccttaagaggagctatttggtacatattcacatgtgggatgtgtgtgtgtgtgcacatgtgtgtgtatgtgcataaccctcaaactgatattaagataatgttactaaatcactacctaattggagatagaaaaactaaagttcacaaagagtgcctgcactttaatgtggaggtttgaccacatatgtatattctttctcatgattcatttgaaattatgtctgtatgataaactaataaagttaatccaaaaagacaaagagagcatgaatctttttgagatatcaacaggcttcagcaaataatagaacacatgaagtgatacaagattggcaagaaagaacagagacacttttgtgccctcaaagtagtgtagcagtagaacacttgagagatttcttcaggacttagaagaaccagatatcatagaagacagaagagacaaaaacagcagattggtttaaaattgtatatgaaatatatgaagtagctgaaccccctttttcaccctggaaagctaagtgacaagtctccaacccaggataaaagccataatttatctttggagaaagacttgggactctagacaaagcataggacaaaaatgggcattttattaaaacaggggattatgcctgccagatggtgagtctacagcccctttctctgccctgcttctagaatgtagcaaccaaacaagagatttttataaatatcaatccacctctgagaaggtatctccagttattgactctacagtggatcccaccgtttacaaatgctgtgtatatacatggtgcttttaactgtatttttagtaaaaaaatattttatgttttaaatatgattgaaaaccaaggatcaccagactttggaaaatgcctctcatagcaaggagagaagaaaatagagataatgtgagactcaaaagaaaacttaaagtataattaatttcctcagagagttaaagatgacataagaacaagaataggaagcactgaattagaagtggtcagaagacaaggaagagcacctggaaattaataatataataggtgacagattcaattaaagagctagaagataatacaaaagtgaaatcatttgctgttttcaattttatgtgtaaacattaagttgattaaaagatcagttgtctagtgctgtgaaaacttttaaaacagaaaaaggaggagtcaaaattgaatagggggagataaccaagatagatactgaatcaggatgtttacattttggcttaggagactcaattttcagcatagtggaataaggcactcccaaactctacacctccataaaagtaacaagaacattgacaaaaacttaaaaaaaacttcttcagaattctggaaattaaataaaggctcacaacagtctgaggagtgtttatttgagaaaaaaacaagtgactctcaggaagaacagcaagacttgtggaattttaacttgccctaattccattctcctttcatcagtgctacagtaaccttgcacaccaacaatctttatttgtggcatctttgaaagccagcatggtagcagccactggagaggatagaacaggtttggagcaccttaaaaaccccatcccagagaattgctattatttgacctgtccaacagcatgctaaaaagctccattctcagggcttgtctttatttgacttagattcagaacttggcctgtgtgaacagcactatccacagagcatttgtcaaaaacagccagtggtaattgctcaccatcatggctgcccaaggctccattaccaggtagtgccaacaagaggctgaccaaaaaatacaaaaggaaaatctgggggaatgagatagctacagtgggttttataaagctcctacatacaccaggaatctagagggccacatagatatccagggctttgtaagagctgagaaaacctgaagatctcacttccagctgaccttgaggctgtgtgcaagaaggaagtgaagaatgaaacagagttatatggcttgatggagtattgaatgcatgccccaacatacacacacacaggctgaaagatttactgattcacagcatttaaggaaatctgtcatgtcattagtggaccacgaagtggcttcatgtataagggaccttcaataaaattaactgactgacttctcatcagaaaccacagaagccagaaggtaattgaataacatattcaaactgttgaaacaaaaagattgtcaatccagaattctatatccagcaatattatccttcaaaactgaaggagaaattaagacatttccagagaaaacaaaatataagagaaacacctgccatacagaaaatactacaaagaattcttcaggctgaaatgaaaggacactagagagtaactcaaatcagtatgaaaaagtaaagtgtgtagccaggtgtggtggctcacacctgtaatcccagcactttgggaggtcaagacaggtagatcacgaggtaaggagatcaagaccatcctggctaacatggtgagaccccatctctactaaaaatacaaaaaaaaattagccagacgtggtggcgggcgcctgtagtcccagctactcgggaggctgaggcaggagaatggcatgaacccaggaggcggaggttgcagtgagccgagattgcgccactgcactccagcctgggtgacagagcgagacgctgtctcaaaaaattaaaaaaaaaaattttttttaaaaagtgtgttggtaaagataaatatgtaggtaaatgcaaaagacaatagaatgtattttcatttgtaagtcttttcctctcccatctgatttgaaagataactgcaaaaagcaagaattataaaactgtgtagatgggcttataatgtataaagatgtaatttgtatgacaatagtacaaggaaggggaagagaatagagctatattgatgcacattttttgcaaacaattgaaattaaggtggtatcaatctgaactagttttaagttaaaatgttaatggcaatcctcagggcagcctctaagaaaataactcaaaaatgcatagtggaagaaacaacaagagagttaaaattgtacactagaaaaatacctaacacaaagaatgcagtaatgacagaagatagtaatggcaaaacagaggaacaaaaaggaaatacacacagaaaacaaatagcaaaatggcaggcatatatcctactttatcaataattacattaaacgtgagttgattaatgctccaaccaaaaggcagagattgacagaagaattttttttaaaaacaacatgatccaactatatatgctgtctacaggagacacactttgagtcagacacaaataggttgaaagtaaaaagatggaaaaatacatgtcatgcaaacagtaaagaaagctggaatggctatgctactatcagacagattagactgtaagacaaaaatcattactggaaacaaaaaaagagacattttataattataaaaggattgctccatcaggaagacataactataaatgtatgtgcacctaacacctatgccccaagatacatgaagcaaaaactaatagaattgaagggagaaatagaaattcaatgataatagctggaggcttcaataccccactttcaataatggataggacaactggacagaagttcagcaaagaaatagaagactcaaacaatactctatgccaactagacctcaaaggcatctatagaacactctaaacaacagcagatacatgttcttctcaagtataaattagactacaagttgagcctcaataaatttaaaagattgaaatcatacaaacttctccaatcacaatggaatgatttttttttttttttttttttttttttttttttgctttttttgagacagagtctcactctgtcacccaggctggagtgcagtagcacgatcttggctcactgcaacctctgcctcccaggttcaagcaattcttgtgcctcagccacctgagtagctgggattacaggcatgcaccaccacacccaactaatttttgtatgtttagtagagacagggttttgccatgttggtcagggtggtcttgaactcctggcctcaagtgatctgctcacctcggcctcccaaagtgctggtattataggtgtgagccaacacgcccagccctgggatgaaatcgataatcagtaacaaaaggaaaatttggaaattctcagttctgtgcaaatttaaaaacacacacagacacacccctaaataagcaatagttcaaagaataaatcacaagagaaattagaaatgagtgaaaatgaaaacaaaaatacaacatatcaaagcttatgtggtgtagttaaagcagtagttatagggaaatatacagtttaaatgcttatgttaaaaaattattgcatgtatattatacctaaataaagctgatattaatgtagaaagaattggtggcccatatttttgactgtataaatttgcatactaccatatatttgtagttgataagttttctctgattgtggtataattcaggaagaattactaatactttctttttttttgagacggagtctagctttgttgccaggctggagtgcagtgacacaatctcagctcactgcaacctccacctcctgggttcaagcgattctcctgcctcagcctcccgagtagctgggattacaggcacgtgccaccacgcccagctaatttttgtatttttttttttttttttttttagtagagacagggtttcactatgttacccaggatggtctcaatctcctgacctcgtgatacgcccacctcagcctcccaaagtgctgggattacaggcgtgagccactgcgcccagccctaggaattattaacactttcaaaccacatgtaaagttcactgaaaaaaaaaaaaaaaccaacatggtttttaaattgtgttaataaatattaagcttgtagttaactatatgcatgctaaagtagttagagaaaagtgtactgatgtttgcaatttactttgaaatgtaataacaaccagaacaaaaaataagatgggttgatagataaatagatatgtgctaaaaaacaagtgtaataaaattattttggtctttttgtttccgttttttgaggcagggccttggtctgtcacccaggctggagagctaatcatagctcattacaacctcaaattcctgggttcaagtaataaaatgttaatggcagaaccagttgatatgtttatgggtattcactataaaattctttcacttttgttttatgtttgaaaaggttcataataaaatgttgaggaaaaaacagtaaactcaaaatgtcattctgaccctgaactatttactattccataatttactaagttaacatcctactgatcagaaaaaattaatattttctttaaggagccctagctcttttctaggcaatactttcttatactttgggaacttgatgtgttatattataggtaaacattttgaaaacaatcaccagagaggtgttatacaagagcataatgatattctatgaggaaataggatcttataacctcagggtcaaaattcctaagagactcttcccagagactacaattatattatttatatatcatattattatattgtatattattatttatattatattttttagggattcagatcagcttactttatgtcccctaatttctgtagaaaaacttgggaagtaggccacatgtagacaaattaataaattcatgcctgctcaaatacagttcatttttccatcctgccattttccagcactgtattacttctacagatcttgctcttctattatgagaaggcagtttagatgccgctaaactcattctctgctctgcccgcataatcctgcaaagctgctggtgttgaggcttcagtgttccatgcagagtgattttccaagtgatgaagcagattctaatcagtctaagatccaactacagactgggagttggacctctgccacctttccctccagctctcgcaacacaatggggaattcctgtgaggatcactgggtacacttcaagctcccctgatcctatggcctcattccagtcacagatcttcctgtctggagcatttccggcccttctgtcctttggcttggagagttcagctcaacctgggaagggacagaagactttggggttatcaaaagcctgttgaattatctgatgcaagactaactggtttgtttgcctccctggctctcttcctgagcttcaaagcagctgagaaaacaacttttttctaagtcttggacaaggaggaaaaccctggcatgaaggatttctgtcgcagacacttggcatagctagaggaaaggtttgtttaacttaccaatgggttttattagcctaggactccagttgaagtgagataatagggtccctgtagaaggacatttcagtcagtgggcttcctccctaatttctcgacaggacccttgcatgcagatgaaaagcatcagacacattcaacaaggaaatccccactgaatttatcaacgaccacgtaatcttgctgatcatgagggagactgagacaggattaaaaaactagcaggacaggaaattgtgtatggatgcaaagtcatattggggagctatctacttcaattgcttcttgctgaacttctctttgctgaacgtattacattgtctctgggccccacatcttatagcagatagcagggatagaaagaaagccagtcctaccacctgtccttacaggaagaaactcttctgcttatacttttcctctgccaggtcatttcactcttcctttcacctcccaaccaatgtgagatttggggttggggtgggaaggggaaggaaatagaagagaggaagaattcatgactggtgtacaggaagccttcctggcacaggaattagagaagagaaagtagaagaatcagtgccagcttaccctcagcctcatggccgcctattcatgtctgctttcctgggccacataggcaaaactcactttttcctaaggttggggctgtattgcaggaactcatgtaaactgccaggaccagaagtctataaaagcagcctccaggccgggcacagtggctcacacctataatcccagcactttgggaggctgaagcaggtggatcacctgaggtcaggagttcgagaccagcctggccaacatggtgaaatctggtctctactaaaaatacaaaaaattagctgggtgtggtggcaggtgcctgtaatcccagctactcgggaggctgaggcaggagaatcacctgaacctgtgaggcggaggttgcagtgagccaagatcacaccactgcactccaacctgagcaacaagagcaagactccatctcaaaaaaacaaacaaacaaaagcagcctccagggtagcctgtgcccaaggttcctgacatctctgtgctgcctgctccacactggccttcctagccacccatggagaaggactgggctgggttgcctcagatgagggccacacctatactttaaaaaggaggacccagacactatccctagaaggtgtcgccatcctggagaaggcctggggtgactatgcccagcactttctgttctgtggctccttttccactttctgagcctcttggaagtgggatcaggccaggaaaaacatgtgatgctatagcaagctgaaaccaaagacttgactttgggcctggccaagccgagaatcttggcagtgattgactgggaagcctgctgttttctatggcattttctgagtcccctaactctgggaagagggaaccagataagtcctaaaaatggatatgaatcagtagagcttctgtgggtcatcaatttgtgcatttattcactcattcattcttgtatttcataatgaagcttctcttacgtatatagcaccacactagaggtttgtgggaccagaaggagcagcaacaacaagaatgggtcaaatagattatgttaaattgaggtaacattaaccataaaacagtaaagaaaactaataattagagagtacagataaagtatgaagagattagagagagatgactttaggctggagaaatcggctgaagcttctggaagaggtgacatttgtatttagactttcagggatgaagggcagaatgaagactgccagtgtggaagcttgcgaacagctgaggcagcccgcacggataccctgtccagctcccttctttgtcttgaatcatgcaatatccatgcagggaaaaaaaaaaaaaaaaagcccttatttgctgttatgtatcctgcctcatttaatgtattatcccagaaaagtagattgagttgtatgtggcagattgggagctgccatcatggtggttaaaagtacagaccaggtagtacagaaccaggtagcctgggttggaacccagcttcagtacttataagctacctacctttgaggattattgtgaagattaacgtccattggttgttgttgttctcatcagcattattactgtaggaaccctggaagtctcccctacccacccaagtcctattgcactttctatcatgacagaccatttctcttttttgagagtcttatattacaatgcagacacacctgagagggctaatgcgtgaaggtttaccagccctcactttagggttagagataattagctgacagcttatttactaagagcaaaatagaaacctggggagagggacataaaagaaggaggagagagtttacaaggagaagcccatgggccccaatggccaattttccttccacgctttatttagagtacataggcctctgtgtttctacttgtcattggagagaaacctccacacaccagcatagggatgaagtgaagaacagtgaggaagatgcctgcccatcattctaggagccctcagctgaaaagcaccgtattgggccctagagaagggaacagagtgagattacagaaaatgccccagatctgctgagtcccactgaaaattcagagcttgcctctaaaaaataaactgaggtagaaacaggtagcagtattttaataagtgcacatttacagagtgtaaattgaatctgcctggcccagagtgtggtactcaataaatgtttgttgatggatggattgaatgccctagagtgaggagcacgtagtggaatgtcacagtggaaaaagcccaaaggcttccctgtattgtctgtcttctgccaccagaatgtcagctctatgagatcaaggacctctctgtcttattccctgctctatcccctgcacctacaacagtgccaagcacaaagaaaagagcccagtaaatatttgtggattgaataagtgcatggatgggtgggtggatggcacaaataacgaaaattgcttccagatggtagtgggattggggatccagcatcgagtacatattggatataccttaaatgttcctccaaagaattgatggatagttggatcaattaatcaaaacagagtctcacgatgttgcccaggctggtctcaaactcctggcctccagcagtcctcctgcctcaacctcccaaagtgctgagattacaggcccgacacctccaaagaattttaaaatatgggtgaccactttccttgcaaggataggtaaagagaggagaaagtgtatttgttagagtgcagttaaagccaagctggtctgatatgaaggaaatattcaagaagaaacaatttggctatttgtgggagatgggattaactgcccacataccacatacctaccacaaggagccccaggctttctgagccacatatatctacactcattcttgctcagttacatatttctttgaaccctcagacttccaaagccaactttcacacattgcacacaggtttgagtgcgatcagaatttttcactagggccctgttgttttattaagtacctaggcctccctgcagggcaccatgtattgaagaagatagaatgatacttgaaaaccacctaagtcagacaatgattagaactccccagatttatgggatggatgaacatctgaaccagcacagcctaaattacctgctggggggttgtctgctttagaagaggatagtttatagtttgaatggcagaagggtcatggggcattaattcagatcaaaaaaagggaggaatctatatgtatccacaaagatacatggcaagcgtcactttttttcctgaaatatattgggctagaaagctaatttacacttcccctcactagtatataatactatagaatcttcaggttagaaaactcaaaagcaatatgcatcttcatatagtatatactactagcatataatattacagaatcttcaggttagaaaactcatagtgaaagcaatatacatcttaatatagtatatgctagtatataatattacagaatcttcaggttagaaaactcatagtgaaagcaatatgcatcttcacataatatgtactagtgtataatactagcatatgacagaatcttcaggttagaaaactcatagtaaaagcaatatgcatcttcacatagtatatactagtatataatattatagaatcttcaggttagaaaacccatagaaaagcaatatgaattttcactccagtcctcttaccatgatgtttgcattgaagtgtttgtggtcattgattgctttgggcctctaaccaccttcttgtttgtcattttttcttttggaatttgggccccagtccaaacacattgcatcaggcatggtttcctgggtgaggaggagagcaggactatcacctcccttgttccacatactatatctccattgatataacctgagaacttgctagatttttgagaattacatctcacagctgactaatattgaactatagttaaccaacattccattttctgaatgctgaatctcattctggctgttccataatgaatcattggtgctctgttctcaaggacaaggcatttcatttagttcaataaaattgcatcccaaacaatgtgtaggatttgttccaacattctaaccaaattgagatttgttttgatatcatgtttatctgatctaatatatgacctctttctctaaattttttgtcttctgttaccttcccatcaattcagcatctcatcattgggtttagttacatgattcacaagtccaaatgtcacctcttcagtgagatctcatgatactctattcaaaattgatgcccccacctccaatccagtacacttcctgtattctttatctgctcttttcatccattgcacatatactcattgaacataacatattttatttattttgtacttcttatctttctttagaatgtaagctctattagaggagcagtttttgtcagttctgttccctgctagatttcatatttgttgtatgggtgtaattgaatacatcagcaatcttattcaagtcagtaagaccaagctagaattctgtacattctactagaggttgctgcccctcaccaggttactactgaccttttggtcactcacaagtccacttaatggtattagcacccagctcaacttatcttcactttatccagaaggctatcaagagagtttgtcacattttttgctgaaatcagatattttttattggtgctagccctctgatctatcactctggaagttcttttccaaagaaaggaaatggaattcatctgacataacttatcacttccttttttctgactgcacacagatcatccttttgatgactcattataaatcctgctccagaaggacagtgcattaatcagtgacctgtccgaactctttgatttccggcagagaggtccctccaggtgtgagatccttttggctggggttcagggcttgctcatagactggctattagaaggtggagttagcaccacagagttggaaggcttaggctcagatgccattcttgtgtctcattgaaatattacattctttttttctgggtctcagtttctgcagtgcataaaataaaaagggtaatatttttaaaaatatagcatgatactttatttattgctatttacacccttttggtttcatgtctagttgctacatacagacaacaaagatctgagatttttttatatgtttagtttatttttactgctatttgatctaaaggatttacgtttatcttatccatttccttttttaccactctttctggcacagctatagtttaggcccttatcatctcatcactgaattattggagttgcttcctaactggccccacatctcccatctcttgcttctccatcttagactcttcaatcaggctaattgcctagaacctggctactcaaaatgtagtctatgaaccacagcatcatcgtctcttgggagcctgttagaaatgcagactctctcaggctccactcaaaacctaaagaatcagaatatgtaggtcaacaggacccataggtgatgcaaacccacattaaaatcgagaaccactgttttttcttctaccatgccattccccttctaagggatatccttaaaattcacattgaaccgggccaggcgtggtggctcacacctgtaatcccagcactttgggaggccagggcaggcggatcacgaggtcaggagattgagaccatcctggctaacacagtaaaaccccgtctccactaaaaatataaaaaattagctgggtgtggtggtgggtgcctgtagtcccagctactcaggaggctgaggcaggagaatggtgtgaacccaggaggtggagcttgcagtgagccgagattgcgccactgcactccagcctgggtgacagagctagactctgtctcaaaaaaaaaaaaataaataaataaataaataaataaataaataaataaataaattcacattgaaccatctccgaactgtctcaggcagaaagcaatctaccttaattttcaaatgagatatttttgacatgaaagtgtaaattcccacctatactttcttctcattggttctgagaatgatgaactagtgtatctaaataactttagaacatttgtaaaaattactgcaactcaactggagactttcttctggtaggagccaagtatattgttatttggtgagtgagggttaagggaaccatatgtgatgggttagttggaaatgttcctattatttattgtgaacttattttgtgtttgacacagtgacaggtattttgtatacttaatttaatcctcataataatgccacttaggaaggtgtttttatcaccattttacaggtggggaaactgagacttaacaagtttaggttgtccagagtcacagttttggttagaattcaggctgcactgtagcatcaaagatgtcaaaatacagtggttgagccaagtggctctgccctgagaggactggtgaccccgagtgggagacactgatgctctctgaagccacccagcttccctctctcatgctgccttgtcatccccagagtgttgtccacacccatttgcttggatctggttcctgccttgggaagagcgaaagagaaagtggagggcacgcagttttcttatgaaaacataatccagaatttctacctatcatttgtactcacattctgctagtcaaagcttggtcacatagccacacctacttgcaaaagaagcagagaaatgtggaaacttggggagttatttactaaagggaagaaggggaatggctgctagaggaaaattgtaggctctgccataggctcctagccaatcagtggaagagctagattccaagcctatgactaaaacctgtgatcttttcatcacattttcccaccacttctcatagttgacagcaaatatttgttgaattaagataggccaagatattatatataagccttttgatcatttgaaattgtttcttccttctctcttgcctccctgattacctacacggttcagtgttcaaactgtctttgtttctgataatgttttaatgtgtaaaacaggaaactgataattaatcttcttcagtagaaatactataataaaataatctactaattattagaggttctgtagaaccatatgagatgtgataatggcttaatgatactgatttttttaaatgatcaaataaccatctcctttaaaataagtgttgtcttaggaaaatgccattgctgaaaacattttttgatattttggctggtatatcagttaactcttgctgcacgcactaatgcttcatgactccactaccaaaatctcagaggcacacagtgatatttaacttgtgtatctgtgggtctctaggggtcaactctttagcctgagccttcctggccaactctgtttcaggtatctattgcccttcttctgagatagcagactagcatggacatatttttctctgacaatggcacaaacgttaagagaacaactagaaatacttgaggctttttgaggcctcggctgggaactggcacaacctatgtcatgccacctggcaagtcatatgcccaaacccacaatcaagggccatgggaaatgctctacaccttaagtaatagaaaatgtagtcacgtagtagagggtttggtgaaggaccagggccaacaaagaaaccttcaattgctttgcctttcgcaagttattttgaatatttgcagtgatagtaaatcttttaaaggtagctttgaatttttttagtaaaacagctaagtttataaataaaattagagaatcaagctaggtttatttttgggcagaaaggtagctatttaagcatgtgttataaaataatgagacttatttctagaagaattgattcaagaatatggcatttgatgacagaatagttggaataagcgtacagccttttaaggtgaccactttgaaaggataacactcatttaaacattgggttataaaatggtttttttttttttaaataagccttgtgacttacagtcctatgttaccactttgtctcaaagtgggaaggggagtgaatagaggcccatccctgatcctttgactaaccctagaaaaatgtgctttatgtgcagattcttattgccaagtcccctctggctcccttcacctcatttgtctacaccatcaaggaggaaggcctggttcttcaaggtaagatccttggattaagccatttctttaagcttatgctcagtgctgcccattgctagtggtaattagtgctatggttctgatagaagctagctccagacagaatcaaaaaccaagatgcattggccagtgatatttaccctaatgagagcaagagagcggcagttgtggcaagaatttgacagagaagattgaggtagggccgaaggagacctacagaatttcctaacagaatgagacaatcaaaacatgaggatcaaaccaagaaagctcggaattgctaccaccccattcctctttgcagatcctatggcatgaagtgggcaatgattctgacaccagtgtggaggtgaggagccagtgctgccccagagccttcttgcttaacaagctaaagaaccatctgggttggcagcctctggggcacaatatcatggctccatgagccctacttccctgactccttctggttatcttgtttccttttcctgtcctgtcctgacatggtcttcctgctggggaccagacctttaggacctgcaccttgtgacgtgagcccaggacttagaaggagctgagttcttgcttagggtatagcaccctgaggccacatcctggaactcactgatctacaatggtgattcattctcagatgctagatacgccagtggttaggaaaggcacccgattacaggtctttccagaaagcaattaacatgaaggggtaaattccagcactgttagaagagtcagcccacaatgtcagatgtacaaaactgctttgtggatgaggaaggatctgcacagaagtgctcaggatacacatctgtcctctgctgtggggcaggagaccccaaccacagagatgcttaggtgaatatctggcctgaccctagaggagcatattgtcactgctgtccatgggagaagtcctgccctgaaggatttataagttaaatatttttcccaggtttatgaaacagggcagtccctgtaatttccccatggagacacaatgcagtgcaaagacctagcagggaatatgcagggcaggctggagagttcatgcttctaactaaggaacaggctgcagccttccctttccttccccttctaaaatgtctgcttcttaatggactcacaaagcggcatgtttgtttggtgcagctgagctccacagcggggactctcaggtccacgaaatttggggtgagaactacgacctttggctcttagcctttgacttatgctatccaagttccttggtaaatatttttttttacaattgcaaatagtgttttctgacaaaggagcagagattttaacaccagattaagcaaagcaaacagcaggcctctttgttacatactctctacgggtgtataactaataagcaatcagaaagctggacttttatttacccagtacacagggtggcattcagctcttcatttttagaggccttcttaaaagattagaagtatagtaagtagcaaatttcgttgaagatttcaagaaattctatggaagattacaagacaatttcaggaggaaaaaagtttgttctgctcagatgacgtgtgtgaagaggcttgatgtgatacacgcaccctgatcactaggcattttgttaaatagcatttctaagcccggtcaaatctggataacttttgggataacatttgtgagaagaagagtcactgagttgcctctctgatgttcattgctaagatcatgattttaagagggaagagaaagttatttagagaaagtagagcctggaaatacaatgaattggtagagtttaaaaaactgcaaggaatgacttttcgaaaaagttggaaaacaggggagaaagtggatcactaaaggaggctgacctggagctgtgtccaggaaagagaaaaattcaggaaaatgtcttataattcaagaacaacaaccagtaaataaaatgcttggttaggagacctcagaacctcacctggttgctttctaagttgttttctctatcccactcccccaagctacacatccctctctgaggtttcccagaagcagtggaacacctctgcttttaccagcaatgcccttgaaaacaaacctcttggcacactctgccttcttgctgtgtgctcccaaagactttgggaaaacaaaaaatgcaggtccccagaaaatgcaggcccctcatttactagaaagaacctttggattttaccttcagctttggtatgatcttgagaaaatctctgggccttgcttttgtcagctggaaaatgaaaacattaaccttgattcaagactttgaaaactgtcgcaacccattggtgggtcatgaagtgaaattgatgaatcacaaccagcatttgaaaacagagagagagagaagacagaagaaagagtgaagaaaaaatatcagattatatcacacatattgtttcatttcataaaatatttcttgtgtgattgtgtgtttgtgaatgtccacatacattatgagtttgtgtgggggctgcagcataaaacgtttttcttacgtggattgttgtaaccatcctgcgggatctctaacagccttgtcacatcagctttgtccgatcctcctaggagaggatgtactcatcattcccttagctcagcccagttgtacccttgagatctccacatactgcaacatcaaagctaatttttcccccttcttaccacatgaccaaactaaaagacacctgcatgattccccaggtttaaagcaaagaaacccttggtccctgggtggaaaacttggaaaggtaccatcagtcaaggccaagtagcttttcttacatgaggagctgcactggcaggtgagccccgagttggtgtggaggttggcacctggagctctgggtgggatgtgcagcccatgtccagggacttagagacagacagggcagctcctgtgctgccaactagaagggaggccgccagccactgtggccgacattcggtcttcaatagagccacctggatggtggaaacaagccaaccacaccagctacccgtgggggtagggaatgatccctcagtgccttttatcccttggcaagccccaagatgcctactggcctgctagcccggagattttataatacctgaagaactcctgagtgctcaagcagagggagggaataaaaggtgagggcagaattcgatttaccagctccacaggccatttccctcaccggttctcaaggattaggatgctgagaacagtcagcaactgggggacttctacccttccctcccctttgttcactgggatgggaaggacaataaagcggcaggctggagagactgaggggctggttagagatttctcaggctgctttttgaaacacttgaaggagccggtccatgctattgttgtagtaaaatagaaagcggaactattctccttttgcaaaaaaaaaaaaaaaggaagaaaaaaagtaaatgaaagaacccccctcctcccagcatcttcaggaggcctcaactcaggccattaacatggtaataccatcctgtttgcatctcctttgtctgtccagcgtttgtctgggatcctggcctctggatgctggaaatacttaggccccaaaggagagggagctcacagccaccagtttcctgagggtttggactctgagatcccaggcagagagagagttgagcctctctgtgcaatgaagtgggaaatgttggggtaggaggggatctcatgaatccatttttcctttggtccccagagttcaccatgcaagtctcagtgcccactaagtgaaaaagctcagcagtttggctagcctcttagagtgatgctcaagtgtgctggggcctagtggagaggtaagagcaggagttggttctgggaatcagctttaatggtgtgtgcccacagaagcatctggcagcagaaaggaaagggagtttacagtgagctccaggttgacccacctctcctctggtcatgtcctttgttcccttagcaagccccgaatgttgtgccacccagaacacagctgggactcaaggccaagaataaagattctgtcattgaaagcagctgggctgtgttgctggcgctgcaggaggcctagaggaaaacccaggtcccagctctccgggagccctcctagttttcaggggctcataggcacaaacacctgcggacttggtgaaacagaacctaaggaaggggaggtccaggggaatgaagggttgatctagcacagcctccccgttactcctttcctcagggatctggggaggatttgtaaaagaaaagccaggttgtttggaacaggacagaagatagtggcttagttcctcagtaagacagaagtgtgttttttatatcatttttgcaaaatcaaagtcaggtatgacaggtttaatttggatcctggggctgtcgtctattagtgtaggtttgaatgagcgggagctggggagaccagggcaccctgagacaggtccggagaaggtgctggagatgaaattagtttcccatatctccaaccacttggcatagggtggcagaagaaaacagaaaacaaagcaacagcgatcttttttagagctggaaagctatgtgcctcatctttcttgctttgcttttgcaatcaagaacagtttgatcaccttttgaaatgtatcaggacaggcattaatctcttctgtttgttcccttgtcacaaacttgcgttaagttttcccaccccatttttttagtcactgagccagctggatgatttattgacaaaaatgtccccccaaataccaccacttgagttcatcagatttcagtttgaatcagtaacctatcaaaatgttttatgctgctggactcaaagtgacccagaagattctcaatttatttccatccaggtacagaggtatctgcatggtaaataccacctccgcacctggcacagcctggcattcttgtaggagcctgggcaaagagccctggaactcaatggagcaaagagagtgaactcctctcccagaggtcatggagaagaaggcaaagcaggcctgtcacattgtccccagcctgccaggtgccactgcagcctcggaaagtttgtctaggccaaggcgctctcctttgctgcttctgcctgcctcttagtgtgggacctcccagggagatgagaaaggagaggaaggactcgtatctgttcagttctcttctcccctgtgcacattcactttacatcccctccctccatgacatcttctcacacaggctctctgctttgtttactttttttttctggcaatcagccttgaagagagattttacaatatttggaaatattttataatatatgaaaaaaaattttaaatacagaacagtacagaaaatcataaaagaaaacaggtgaatctaacaccccaaataaatactaaaattttgtcccatttgtttcagattttttttttatttacaggaatgaaacttgacaaactttaggactcctttgtacctattcctggtccattccctccttatcccacattcctccacaaaagtggaaactctccagagtttggtctacatctttcctctccattcttaaaaacttttctacatatatgtgaatccacacatagtataatgattgattttgagtgcattctgaaatttgcataaatgatttattgtacacgatttcacaacttgcttttgttgcttaacactgtttttgtaatatagccatgtgatacacaggtcacatgatacacaggccacgtgatacacaggtcacattctttcaccttagatatccacatccattcagtgtgtgaatgtaccacatgctacccactcccctacttatggaaattttgattatttgtaacaattttattacctgtgcttcttgatgtttaggtatgagagtttcactaggtatatataaaaaatggaatggctggtcagcgtgtctacacgtttccatttttactatatcttcccaaattgctctccaaagacttttaccaatttatactcgttctggagatagtagaccaatttctctgcagcctcgtataatcgttaagtttgttgtcatctttccataggcagtcttctcatgccttctttagggatgcactgcactctagcctgagtgacagagcaaaaccccatctctctctatcttaaaaaaattcttcatttccctaaagttaactatataatagttcccagaaagtgagcttttaatctcatccatcaccctcattctcacttgaggaaactgagttccagaaaggtaaagtaatgttcactgcctcaaaattgggtttgtagccatttctaagccctcagcctgggctcctaagattttagaaaatccgaagtgggtttgggccctctcatcttccatcagggaagcccctgtgacaacttacctctcaggcttcatgagcctctgttgagatacttcaggcctgtcctgaaatttgaatctggaaattctaagctaaaatggattggtcatactgatacaataatccttcaacgaagtccctgagtgcagttagattataagtttggccaggtgtaactataacctaaactaacagtggtatacatgatagagatgtactgcttcctcctgtagtgccgaggaggaatgcagtccagagctggtttggcagcttagctctacatgtctatcgaagagcccaggccattgactttttgctctgtcacacctaggatgttgccgttaccatggtccagaatggttcagcatcatgccctccatcccagtagcaggatgtgcatgagatagagaatggtggtgggagagaaagcatcccccatcccttaaggacattaaccagaagttatacacattatttctgtttatatgatgttggccagtctgtaaatatatgatcagaaaggctaaaaatatagtcattaatctgggtggccatatacccagctaaatttcgggatttctgttatcatgagaaaagaaaatgaatattcggtgacacagccctttctgaagagcccagttgcagagattaggtgcaatagtacagacgtaagggctgggcttgttgcataatagagttatactcttaaaatgcagcataaatattgtatgtattgaaaagtgccatcaggaccctctttggttccagactctaaagtagaagagaaagggtatcacttcaccaaggatcagcacccaaaaatcttgttctgcccacccaaaacagaatctccttcaggaaggaactttagtatgtgttttgcttttatgcagtatccaggaaagaaacttcaatgagagctactattgcttatagcacaaggcagggcatgaacttgggtccaaagtcatagaccaaacacttttttttttccaaaatgttttttcctgcctccactttttaaaaaaaaatgaaacaaaatatcagttgaaataacattattgagaaaaactttattccaaggcctggactatagttagactggatttacatttctcttttagaacctggaagccacttggctatctttgcagagttaacaatttgcatttgcaaaaatggccaggtaacagtaccaaaatatgttaaatcaattcaggttgttgattttctttgaaagtctcttccaaagaacttcatgttctttctggaatatgatttaagctgcatttcagtgagttcagttcagcaaatatttgttgagcatctattgttcacaaagcatggtgctcaggggtcaagagatataaggctgaaaaaaaaaaaaaaaaggtcccttccttttagtagcccagaatctagttaggagagatgtagttaaataagtttaatcaaaagccaactgtgatacctattaccaaggttcaaacagtggaatatagaaggataaagggaatagacttattccaagtaggatgactgaggtaggttcttgagagtacgtgggacttggactggatttcagcttgtgaatactgacaaaaaccgcattccattgtctcttgacagaagccaatttcttttgctatttgaggatagattcagggacactggggaatgctgattagttccatcactaatgctgattagtagtgaatgttgagtcatgctgactaatgtgttctaaatggattgactcaacaataaaggcaacgttgagagtcaagagttcagatcctgaatttcaccgatgaagtgtaaatcatttcgccacttagtgcttaatttttttgtcaattaaaatgtgctcgtgggtgagaatccagtaagtcatcttgacccatgagggctttacaaacttcaaggataacagacagcttaacagcaactaccaggacaggcttatgcaacctcaggttattcatagctcacacagagtcagaacacccatcacatgctgctcgccagccatgcgaaacttctgtttcctcacacatgccatgagaactgacaaacagtgcactgaactcacaaaacccgacaaatagaggagcttttgaaaaatcttcctatctacctactggggtgtctgtgtctttctacaacaaatgtcgccacagaactaagggcttgcattgcagacacagctctttctctcttttgacatctccccagctagactgcttgagaacctggccttccatgtccagatgtttactgaattctgaagccctcccagagagcccaggttcttttgttgctctccaaatcatttcccacagaggctgaccagtgtcctgaaggagcccttcaatagggaggataaatgaaggcagatgaagacatgaccccctgaggcttgcccacatccactggaacaaagggtgtgaggcacaaccttgtaaggagtgttttggtcagccgcgtccctatgcgaggccaagtctcccccacagggctgctttcaatggctaccatcatagtggaagtattgggcatttgttaaggactgtggtgtgctagatatagcacaaaacatctaaatcatggtcccctgcctttgtgagggcttcctggctacagatggcagctggctttctcaggggaaacttgggggtcatagagaaagctgaagaggggtgcttgcttctgtggatgacctcttcccacccagtgcagcgacactccccttttgtctagagctatccttagtcaagccagggctgcgggaccctaacccacacttccgctgtgtttctggatctctggtttgcaaggccagtggctctgtgggcaacacgtatgaaagaggactgctgttggaggaaagttccatttaggttgctggtgggaagttagtgcatttcataacaatttttttttttcaaactttctcttttttttttttttcctttaggccaagagaagccatagggatactgtgacctttgtctagagttgatgggggtgtgatttgtgaaataaaacaggaccgtactgcttggaagaaggaaacggaagctgacataatggggattaattagttgattgctgttgagatggtaacagatttgctcctaaaccattgagctagcgatttcagacctagcagggaaggtgaagatgaagaagcctttgttcaggtctctagatgtgtagggctgagggctttgccgccatgggatgtcaacagccataataataatttgcacttatatagcacctttcaaccaggcacctcaaagcggtttaaccacattaattaattaaagcccacaatcctcctggggagaggaggaggatgactaacaagatttgtaattacaggagggaacatttccgaataaagtattgtctaccagataaaaagagtaggtgtaaaggaattggggtctccaaatagtaaccgattcagaaatgaaatcatggaatgatgtgggaggctgggggcgggcatgggcaagggggtcgactctgtgtcagagggaggtcgatgggctcagaattcactgacaggttcagatccagccgagaagtggagcatgtatggtattagtggcatttgaaggtcattagtggcataactattgtagtgtaaattcaagttttattggtatattgtgtatagccctgcagaacaaagactgagactcatgcagtatttaataaaggatgaaatgatttctttagatttaaagcccaaagctgggccagtcaattagcaaataaatcaattggtgacccgtaggataatttagtcgtttccagtagaacacccagcctacacactcctactgccatgaggctctgattgaagcatcagactgggttcagggcaaggtctgggggctttagccccttcaaagccaggcattaaatctttccagcctttggccttgtgacctatcttacccaggttgttagtgacctcaagctgtcctctgtagaatcactttgtacctgctcctccatcagagatttttagtgcattgagggctagaatcaagtctcatcctatttcatgtctcctatgagtgcccaacagagtgctgtgcaccaagtaggtgcagattgatgaagattgatgaagaaagactgagtcctttaacgactcagtatttgttgagcgcataccaagtgctcaggtaaagcttgaaaacaaagctcagtgtgtgcctgccctccaaaaatgtactccaaggaatgggaaaagacttacaaactattaactataatataaagcagaatcacatccaagccccgggcagcaagggcaataggaagagcatcttattcagctggagtgaatcagggaaggtattggtgtgctgtgcatcggaaggcaagaaggatttgggtagacctggaagaggcagagcaggaagatgtcccaggctgtgaccatgtgtctccctctgagtgaggtacattttgagaacttgggatgttcaatagaatgttggtgaaaaccaaggtgagttttcgtatttaatcaggaaatatacatttcctgtggattcttatgacatgaattggttaatttcagacatcaagggactatttgagaagttggaggtagggttcaggatacagtactccaaaatccggcacgttggccttgaaaaaacagcagaggcaggaaggccgttgtcaccttcccctcacccctcctctcctgaagcaggttgtaaaatgttcattcctgaagtgttcactctctacccagaggaaaggaatgtccttatctctgaagacacagggacagagaagaatctgaacaaacaggccttgctaaatttcccccagtttattcccattagatcatactctttagtcctccaatcatacttctgcctgactgtctactcttcatcaaacttaagcataaaaatacacagatttccctggtttgggggtggtctttcttcttattcttctttttttttttttttttttttgccagagtctcactctgtctcccagtctggagtacagcagtgctatcacagctcactgcagcctcaacctcccaggctcaagcaatactccaacctcagcctccgaagtagctgggaccacagatgggcatcaccacacctggctaattttttattttttgtagagacagagtctctactgtgttgcccaggctggtcttgaactcctgggctcaagtgatcttccaggctcaagccaccttcccagctcagcctcctaaagttctgggattacaggcatgagccaccgcgcccagccaggtcttcatttctaaaggttctcatgtcacataaaacttacgttaaataaatttttatgcttttctcttgtaaatcttgttgttgttgctgttattgttgtttgagatggagtgttgctctgtcacccaggttggagtgcagtggcatgatcttggcccactgcaacccctgcctcccgggttcaagcaattctcctgcctcagcctcccatgtagccaggattacaggcatgtgccaccatgcccggttaacttttgtacttttttttagtagagatgaagtttcaccatgttggccaggctggtctcgaactcctgtcctcaggagatctgccctcgtcggcctcccaaagtgctgggattacaggtgtgagcccggccttctcttgtaaatctgtcttttgttatgggggccttggccatgaaccttgcaatgcgttcatgcaagatattactttttctcccctacagtttctggtgcccaatatggggtgactgagacaccccactcattctggatcttgcagatgagatcctggggcaactgacaaaaagctggaaaaattagaattcttatcaaagtcagctctcccagatctctgtctgtagtgcttggtcaagagagacgttagaaatttctccttgtcccttccttcccaaattcagattatcaggaaaaaaaaaaaaatgtctatattgtgactctctgactaaatctggctttaaggtactcgtttgttactgatcctttccctcgcagggactgctgtctctttccttgtttttctcaatttctgtcctgataacttggtttgattttctccctgttggggcatgcaagctgtcttgagttccccaaccaacttcaggggagggaactcaagaatacggctggacagaaatgtgggttgcaccctatttccagctatcctaccaagtattgccagctcttggggggtttatttgtatatttcttttgactctctttgggggtagttctggatttgggagggctgcactctcttttgagaaccccttcttagtccatggtgaagtcataaaaggctctttggttttggttgagtcacttagtaggtactttcagtttaaaacaagaaaaaggtaaatgtatatgtttttctcttgttaatctgtgttttcttgtagtgctctcagccacgaaccttgagataggtgaggaaaatatattatttttcctcccttacattgagcaagatgctgtctgttctctgcaactcctaattgttctctcttcacctccattgtctgccacgaaaaaaaaaatgctacattgttcacacattaaaatggatcactcaaaagtgtctgaaaaaagcaagaggaaaacatatcctaattccaaatgtcaaaaattaagtggctcctccttgagactacctttttgaccccaagaaacaataagagagtgccctatacccagtgtttgacaaaccaatacagtactctcctgcccaaggccctccaggccttcaccacaaaccatgctgcagggacaggacgtaagcactgcctctgatatggagcacttgctgcgtgtctgacacacactttacatacacaatcttctctaatgcttccagtaatcttacaggtagaattttgtattattccttctctacagatgaggaactgaagcaggagaggttcagtttgtcaccagaaaggatgaaatgtggatttgaactcaggcagttctactctcttttctctttcatcccttgccctgtaatatttctgttcacaactcttattcatcctaagttcactaaagtactcagcataatactacacacacaatagtaaagaactcagtgaatattttctaaataaaagaatcaccaggaacaatgctagtagtttgatcttctactctgagcagtgatgctcagaatatagtagaggttccatcactgccttatcatgtcaccatttttaaggagcagaagacatgcacaggaaagttgccccaggaaatgttcacaagaaagaaggacacaggtagcattcttccccgtgagctgataatctgccaagctggtaccacccatgagattctagtgtggcattttgtatcattaattacttttactgaaagtaattaatgatgcaattcagagatattttaggggtgtgtgtgtgtgtgtgtgtgtatgtgtgtgtgtatcaaagttcaactttgtctccctaatcctgctagccttctggccattctattaaggtattgcagtcctggtgaagattcagaaatgtgtggtccccgtcagcctacagggtgaacattttggattaacccagagagccttgaactctgtgcataatgtcttttaggttgtgtgttgtgaacaaagcaaaatgactgctcagagacagggttgtaaaagtttgtccagcaaaaccaggattgccaaatgagaattctggaaagggaggataaggattaggtaatgggagaaaagtgagtgaaggcaaggagaagtgcaaaatatctgattctagcctaaaaactggtcttggaaccatttggaagggtcattttttccatgttttattttcaatatcatcaccatcacttttatcctgtggctgtgaaaggactttcttcattccactccagaattcaaagaggcttcttttgcacaaatggagggaaggcactcatcacacttctcagccaaacatcctaagtgtgagagaaaacacactgcctacttctgaatttcggtgagggcagggttcagatggaacacatattttccaaaactccaaatagatctgggaggagaggaaaccattaaatcactagacataagtcaggacacatttggttttgttccctatcaaacagtccccccaaatctcagtgacttgcaaaatccatgcatgtctgagactctccagacaagctctccatgtgtgactcaatattgcacttcagtattaacatgcactgccacagttgccacagtaggggaagggaaaggtggatgggggagagagagaagaaagtaagaaagagagagagattgagcactgataattaagtccttccctcaaaaaatgatatacattccttctactctcctggccatgcagccactcctaacttccaggaggcaggaaggtaccacttcctccatgttctgaaggaaaggggaactggatattggtgaacacctgtaatgtttggcatgcacagctatacccagtgggcttgcaaatgtttccttcttccatattcacgcttgtatatacctttccctcagattacctggcatacatcaaagatttatggggtagtgttcaggaagaccaaacagttttgcagcctattttagtccacaggtgaccttttgaaatagaggggtagccaggaaagaccagttaactctgggtacttttcccctagagctttcagacacaagtaactctgggaagggatagtgggttcaagggagccatggcctgatttcaatgacacattcaagatagaacaactagtttgagtgaccccagaccatcatgccttgtgtgaaaagacttttggaaatgtgcccttccatttccattctgccgcttgttaccagacatgatgcacgttccttcaaagccctgtgacttttccagaaagcagctctccctgcaagagagagaaactttcccttattattctttcagtaatgaattcctgctctgaatgggctgcctccatgtgttttcagtcaagtgctgatggcagccttgcctgggggcatttccaaagctgaggacataagagatgaaggaggtctcatattgacaagagctgcttttggttttccttccagtttagccctcctgagccttgaaatgggagataacaaatgattcatcagttcttgttggtgaaccaacatgaccaccacacctctttgctcctttcaaccaatgaaaaaatcatgttttaaagctttcctcagagaggtttgtggacctggattttggtgacttaacagggatttaactttctcagaccaaaccagtattttgtagatgccaagacttcctttcttcaggtctcaaacatagacttcgcgtaccctgaggtgataagaacaaaggagaaattaggtcaccctgtttcctgcctaaaacctaatctcaagtacacaagctgcttccaagtaagctgtggtggtaggccatgtttgctgagagccagcccactcactctccctaaagcaaatgtcttcagacaataattcagctttcaacctacctgcatgaaacttgtacaaacttttagttacagttgggctattttctttctttttcttttttttttttttttgagacagagttttgctctgtcgcccaggctggagtacagtggcgcgatctcagctcactgcaacctccgccttccgggttcacgctattctcctgcctcagcctcccgagtagctgggactacaggcgcccaccaccacgcccggctaattttttgtatttttagtagagacggagtttcaccgtgttagccaggacggtcttgatctcctgacctcgtgatccacccgcctcggcctcccaaagtgctgggattacaggcgtgagccaccgtgcctggcccagttgggctattttcattgggaagaggagtctcaattatctccggtaaaaggggacacatactgttaaggatataggtggtgcagaattggaaagccttctggaggggaggcagccctgggaattcattatcctggggtctctgcttttctttacatgtctgcccagggctactctcactctcccagcagattttgtcctgcatactatagtttatttactcaaaacttcagtttgcacatggctcaccctgtgtttctctcttagcctttcaacttcagttcccattggcttttttccttggttaaaattctgaagagagaatctgattagctcggacttatcttagtgttttgtctcagacaacatcattggtcactggctaaccaaacctttgttggataaggaagtcgctgaaaacatagctgcccaagcagcaggaggtgtgggaaggccagcttttcctagaggggctgtgagagggcaagacagtgatgaactccagggcatgctttacaccctctaactggactactgcaagcatactcattccctcttgcttcttgctcataactgtagacctggtccccttacaccctcacagcctaggcatctcttttcactgctcacctccagcccctgactccaggatcttacttctcaccctgttaaagtgcccagtcacagaggtataggactagtgagtgggaaggaagagctgttgagatttatttaagaatatacagaagattagggaaggtgtgtaatgaaaagaggaatgaaaataaaatccctctctcagctaaagaaaattgtgttcccaccatgggacccagctacctttcctccttccaccagtctttggagttacttccttttcaaaaaaaaacagacatcagcagaagcaagaggagcttccattgaggaaccctgaccaagcaagtgggaagatattctctcttcattaacccccaaggtcttctctgtcccctgcaaggatcccttgtccctatccctgatccttgcatttctccagcccccaccctcaggtcttgtaaagtccagattcttgactaagaagtcccaaataactttcaaactaagattttaaaacacaagtgaaggactcggtttggatcaagtttttgccaattgtgttcttagtgcccaaagctctttattggaagttattcacaaatcttcatgatggtttttggacgactagtcacgtgtggtgttgccctatttcaaatgagtcagagaaattgtgctttatatgaattcatgcatcaaccagaggattagggggaaaactgaattgtggtagtatgctttaccatttattcattagatactattacttttgtacctcatcagatggctaaaagccaaacccaaaccaaatgtattcaaatttcagtctgcccatattatttttagtggacgtgagtctaggagtgaaggagaggctagtctaaatgtctgtgtttccttgccctttcttgaactccgggtatgtcaaaggtgattaaatcattggtcaaactttgtcctgtgactgacacttttatctagtgactagaattgcaacatttccctaggagcctatgatagtttttccaaacctgctactgtggggttctagtcagttcctccagagcacctccagatccctgcccattctatttagaatcggaggtttaagtctattgccactggctgtcctctggggcccagaaacctatatggggtttgtccagcctctcatcccagcaccatcgtccaaaccccacagtcattaccaatctaacagcttgaaagttgatacaaagatgaggcagaagccagtttggctttctcccagttctctgtgcccctccggagttaatcaacaacgacctatctttgtgtcaataacataagcctctctaactagaacacctggtgaaaagccggaggaaagcttaaaatgaagcaaattttgcagtgattattctgaccctcactgtttaagctggactcaggatctccagacaaaaactgcttgttaaacccaaccaactagttggatgaaccttaagccaccttgggttttgctaatatttttcatgcccacacctcaactccaaagtctgtaaactttaagcatcaactccccatttcaagcacacagggtttagtgagatggcctgagttcatctcgctggtagaattctttagtggcatctcctcatccctttcccaccctcaaagcccatcctgatggtgcggtcacaccactggagaaaccatagaccttcttaactgggattaccaacaccttctcttagtacgtattcacatggccttggatgttaggtgactgcctgttcagagaaagtggggagggtgaaagggagtgaaaaggcagagggcacatggacaacagttccttgctgtattcgtctgctcaggctgcataaaagaataccacaaactgcatggcttaaagatcagaaatgtattttcacacggctctggagactggaaatccgcaatccaggctccagcaggtttggtttctccggaggcctctccccttgtcttgcaggtggacgtcatctctctgtgtcctcacatggcttgttctgtgtgtgtgagctcttagtgtctcattcacttcttataaagacactagttctattggattagaactagtatcttcttgctttttattttctgtgtatccattgtatgttttttggtttgaggtcaccatgaggctaggacctcatatttatgaccttgtttaaccttaattacatccttttgttttatttttggttgttgatcatgatgtacaattcattacttttttttctttttttttttgagttaagtctcactctgttgcccaggctggggtgcagtggcacaatcttgactcactgcagtctccacctcccaggttcaagcaattctcctgcctcagcctcccgagtagctgggactacaagcatgtgccaccacacctggttaatttttgtatttttagtaaagatggggttttgcaatgttagccaggctggtcttgaactcctgaccagaggtaatctgcctgactgggcctctcaaagtgttggattacaggtgtgagccaccatgcctgctcattaattaccttcttttaaaggccttatctccaaatacaatctcactggaggttagcacttcacatatgaattttgaggggacacagctcagttcataacacctaccataactgttttcctcacagaacatcccttatcctctgatcttgcccttcttatctgattgggaaaaaagtagatgctggccaagaaatgcaagtatgactatgcagtttgagaattgctaagctaggtggggagggtgcatgagacaggaagaatgaaaacgtgggtggatggatacatgaatggatggttattacatggaaagacaaatgaatgaataaatggctttggcagtgtgttgatggcaccaggacagaaattacgttctgtttctttagggtttgtcttttttttttttttttttttttcaataatacagggcttacaaactcaaatgtgcatgccagacaggtaaaaagagttgcaaaaagaggccaggtgcaataataggcagttgtagggactgacagattagagagagcctaccgtatataaaggggcaccagttactgacaaagactctcattctgaccaaacttgagtcaggctcctctgagtcctctttctgactaggccccaaccttgggctctgtccttggcttgcttagtccagttttagcaagaatcctgctaagtcaattgagtgaaaattccccaccctttgtatttgatcaccctcagtacctaatcaaattcctcagcccccacccttaataccctatcacccttgcctgccttcagtaagaatcctgccatgtcagtttagcgggaatccccctagccttggtgtttcttcttagtaatttttcatccactgacatccaccctgctctttggctacacattatcacttttccttgttgtattcggagttgagcccatctctctccaaggctgcaaaaccccattgcagtgttccttcttgaataatgtcttacttaaagtctttaacaactgtcatgaaaaatttctctttcacagtctcagctctagacaattgttatcttgtgggatgctggcctcatgttgccagaatgtcggattttacaagggaagccagaaatctgggttttcagataaattttttcactatttttattttatttatttattttttgagatggagtttcactcttgttgcccaaggcggagtgcaatggcgcaatctcagctcaccacaacctccacctcccaggttcaagcaattctcctgcctcagcctcccaagtagctgggattacaggcgcacgccaccacgcctggctaactttttttttttttattaaatttttctttaaatcttgaaattcaaaaattataaaatattgtataagccaaatgaatgctcttgtagtccgaatgcaccctggaggctgccagatttcaactcttgggatgctagaaaggcatctgtaatgttatcacatgaagatatagatgcttgtgagtttaggctcatgagtagactgcctgggttcatactgcaatccaccacttactagctttgtgatctcaggcaattatgcatataattcttagagttattataaggttaaaattatttaatgcatgtaagtacctagaacaatgcctgctgcctagtaagaaagcagtaactgtgagctggtattattagctagtatcatgaaatctcttggtttccaataataccatttctgtaaaatgggggaaacccacttgccttttttaccccctaaaggcttgttgtgcaagtaaaagaacaactgtgaaagagcttgaaaaagtagacacattgctaagaaatacaccaggcatttctatgttcctattcccacagatgaggcacagcctttcccagtgcagggctgggactctgtaggaagaggaaaatagcagtaactagaaccagtcctttattcttctcagggtcatttgctgttttgttgttcttagaatttggtgagtttttctttttctttcttttttcaattatgataaatttcaacattcagaaaagtaaagaaaataatataatgaacacccaaatgcccttatctagatttcctaattattacatttggcagatgtgcttcacttggtgagttttcctggcagatatatgtgaatggaacatgcagagatgtggtagagaagtggggagaattgcagaataaagacagactgggaagctgagagccgtaactaccgcagcctctacttattttttaaacttgtaagatccaatcaagtgtggatggttgccttttggataggaccctggagaagggacttctgtgcagaatggtttgttatggagaatacattgttagcaccttaaagaaagtaatataaatgggataacagaaatgattttattatttatgtgattttaatttatttttaaagtatcaatttttttgcaaagagaatatattcatgtattgcttatgtcattgaaaattaaaaatttctagagagactttcaatgtggaaatgtctctgccatgaagaactcaggggttgaaacttgtggatctgagagaagtctgataaaatcagtgatttaaaaaatgttggtcactaaaattgaaaggttttaaaggcagaaacactccgattcaaagaaagtatatgctaattataagtgattcgtttctggtagattatttgaaaagattctctaagacatattgccccatttctcaacatcaactattactgcatttaaatgctaactcttctctctggaaaggatgtcttaacaacatgaaagcaactaaactttgctttaaaattctattattcagactccacattaatttaagctgacactccttctcaattggggcaaatcatcaaagctttattgtattgagaaccttgaattcagcaacaaagagcgtggggtatggagggaaaacgttgagaggggaagggtggagagctcccaaggccaaaagaagggaggggcagggaggaacactgcaggaaggacagcagagagaaagatggaccatggagaggccaaggggagagcggggagttagaaaaaggctgagataagcaatgggaggcctcctcagaggggccttacactgtcaaactgcccctggagcctctgctcattaacatggtagaagcaaaactagcctacaactttgtagtcacaaatttttctccagagttatggataaaaagggagctaggagatagagaaagggaaaacattccctttcttcctacatttggatgcctctccaatgtccttcctaaggcaccctgcccagtggccagtgcctgccagtaagcccactccacagaccctgaggcctggagccccagccctggtcatggattagtgcctggccaagttgcactccaaccccaggcccgcagccgcccttcctcctcctttctgttgtgattgactctgagatatatgatgtgggatatactaggtgcaacgcatcatgttcgttattgaggcataaggtaaggaaggatcttttgaaatgtgaggacatcatccacaaactgtcactgaccatttacgatttataactagaatgtaataagatttataagatgcactttaaagcctaaaagaaaactgagttttttcaacatgtaacaacatgtaataaatattaatttcaaaaaccaaagtagccccagttggtcttttctctacaccaaaacaatcctcaaggatgcatgaaagcccatggacactgtggagcagacagctcctagtgtccagaaacccgtcttagtccaagtgggggggcactgcaagaattcagtccccagcctaccaccttccagctctgggccctcagagaatgcccatagccttcccgagtcccaattccccagtttgtaaaatgggaatagaaataatctgcctaatcttcatgccagggggcctgtgaagatgacagggtagataaatgattggttttccaaccttcatggaaggcctaagcctgagtctatgacctcctctccagttttaagacataaatcagatcatgccattcgtctgctcaaaactctcaagtaacgctttttcactcagagtgaaagtggagtccttccacaggcctagaaagccccaccgattccagcggcacctgcttcttcgcctctcacagctcctcgcttgctcacctgttgcagccacactgcctcctagctgaaccctctcacaggcaggctttcaccttagagcctttgcacttctgaacccttgctggaacccttttctccagagtaccatagctgactccctcacctcctttcctcacataatggatgactccctcacctttaagtttttgctaaaatatcaccttctctatgagactgacccacttaaaattgcaacccgctctgcttacccccatcctgctctacttatattttcccaaagtacttatcgctatacaaggtaataaataatcaatagctcacaatgtttacccttcattctgtgtcttctctgctaccatataagccctggagggcagccgtctttgatttattcatttttttcttaagcacctagagcagtgtcaggtatattaatgacctgcaataaataggttggatctttcttagaagtccaggatataacatcaataaaagaagggctgctacaactgaagggatttgtgagctcaaaatccctcctgctatctctctacgagcaagtgcaaaaactgctgacatttgttcttgtgtgtgaaaccagttttgaagttacaaattgctacttgatgtcaggtccaagggcctacacaatagcttgcacatagcaggtgcccagtggtacagattataaggggaagggaagtaacatttgttgagcagctaccaaatgataggcagtgtctgtgcctagtgaactatagaagtgatttcatgaaactgtcaacccttctaccattgtctctccaggacctcataccaagcctggcatgtattaagtactcagtaaatgcctgcttatttccctaacaaccctctgaggcaagtaccattatccccatcttggaagggcccaagattcagatttagatagcttgcttaatgtcatacagctcgtgatcagagccaggatttaaattcttctcagacaagctgcagcctctctgattctttgagagaatgtacattagcatccctccgagcttccctgaagcagagctgtctcccagcgacaccggagatgaggggaggggtctctttctccacctggactcacttcctccctttgtgcatttggctcacctggaggggtcccctgctaccttttgattaatgggtctgcccttcccatccccccggccgaatgaccccagagttagctgcagttcatcttgaatcataaatcaagttctcaaagacattgcagctttgtgctcaaaatctcactagaattcacattctttgtgaaaggcatttgcttatgagtagaatgatggattcatcaagtctctccttttaagaaaaatctggatggtatctgctggtttctccctgctccctccaagaaaaaaacagccctagttactcaatttcatgtagttagaattcccccaaggacctcatactcagcttccaccctggccatactaaagaagagccccaatcatgttgccattttacatagatagaaatcatttgcaacttgcacatttgttgtgctttccatatacccacgattagctcggattttattttttagccattgctgaagtgtcacgcgtcagctatttacactgtatggggacaaaacaacctaatgtatgtcccagacctattttatagaagccgagaggcagcctctgagtctccggttcccagaactctagccctgggagaaagcatatccataaatctcccaatgctttatgccaggttagaatttctcttgggaattttggagtttgtataagagttgcctctaaaggcaattgatgaactatagatgtcaggcgggttttcattttctgtgtgctttttatttcatctagaaccaacagtggcctttagaattggattcttttcagagactctctctataggtttcatgttcaaaggctccaggttggaggagctcgaggttcagctgagtgtcagaaatgaccaattctggctggacgcagtggctcatgcctgtaatcccagcactatgggaggccgagggaggcggatcagttgaggtcaggagtttgagaccagcctggccaacatggtgaaaccctgtctctactaaaaatacaaaaaaaaattatctgggcatggtggcacatgcctgtaatcccagctactcaggagactgaggcaggagaatcccttgaacctgggaggcagaggttgtagtgagctgaggtcacgccattgcactccagcctgggcgacagagtgagattccgtctcaaaaaaaaaaaaaaaaaatgaccaatttcaccagtactgctctattagaaaaagggtgggggtagttcttcggttttgtgactatcctgtgtactggaggacatttgtacttgcagcctcatccagaaaatgccaggagcattccccgaggcactctaacagtcagaggtgtctgtgggcaatactccaagcacccccggttgaaaacaccaacaaggctatctctgaaagacggtgaactggggcagcaccactaagtttcaccatcagtgaggcgtcagtctagatgggcactttctttccactgtaagctgcttcctattcttgttgcctttgatgatctttgtttgccttcaagtcgggtttgttacatttgttttcatctccaattcctgccatataaaaatgagggcagtgagaaagagaaaggaaatactgaaattttccctcggactatagcctcccaagaagggtcgtgttctctggaatgacttttaactctttatccagttaatgatcgggaaagtttactagatgtaggttcccaagcccagcaagcagagtatgcgataagagatagaaacagggacagaaaaaaatggatccatcaggacccagacattggggtgcaaccagtgggtcttctccagctccacagcgcatcagttctgactcgcttgtagattcctgagtactgctcatctgccctacaaggcatagtgggttttctctgatttctagaaatgtcagcattctctgcaaggtgaacggccagagtcgggatcttctattcaggcagagattatataactccctgggccctggaagagcatgactgtctaccaggaaccatccagagaggctgtcagatgaatcagcatctgttcatgccctgccttgcttctcctgggcatgactgcctcacatgccaacacccaggcttacaggtcaactattccaaccctgcatcctgcccaccccacttgctggggagtgctctctacagctctcagtgcatcctgtttgttcagacccctttgtcttccactggcgcaaccgagagaggattcctccgagcccctttgcttttggctttgaaatcagatcctggcacacctgattatactcaatagctggaaatggtaaggatgtccgatggcagagagctcttgttttaagttctgcatgccaggaaggcagggggctgggtctccttctcagggctaggctggaggggcaggatgctctagcggaggaagcagtgttaacttgaagggaaacgcagttgaaaaggaactcgaagcacgggctgccaagcgcgtagaagtggtaactgacgacacactgtggggctcagaccccttcctctctgctcatatgcccctagatgggaaacattcagttcctgctcaagggaaccaggagaatcaaacctgtctgtcctgctttttctgtagaagtgtcagctctgaggccttgactaggtggaataaatagtgacttacctcttaaccacagtgaaaaacccatcaagcatttggatattaagggctgcccctgtgttctcaagggaccctcagcctcagacactgcctcctttcaagcaaagatgctgccctaacacgcaagtccagtggctttaagagtcattatgaaaatttcacacaaaaaggcacaaagagcatccatgtaccgaaacccagcttaagaaatgaaatgttactgatgcaattaaagccgcctttgtccttttggtcccatccttccatcctgccttcccccagcagtaaccactcagtcattgacaaacagtgtgtcaaacatgcacaaacggtgatgtgtgcatccctctttggaattacttaacctttttgaacctcagtgtattcatcggtaaaagggggctactgacaggatgaaggaaaatgatttatgacaaatatttggctgttgttcctataaaaaggaaaaagtcaccggaaaaaatgggtcaaatgtaagaccctttccagcctggccccaacttgccccggcagcctcctctcctcttgtagccatattccctcctctcctctctgcagcagtgttccccagatatgccacctgtgtccatgcctctgggccaatgtggatgctgtgcttacttgcctgtaatgctggtctcctgtcaccatcttcctttaacactgggctccactgtccccacctctgacagggcccagatgcagtgactccttggtgctcccatggcctgatacctctgtctgagcacttgccgtatggctgtgatgttcctggtatgtctgcctggctttttcactgagctgcttatgcagcaaggcagggatggggtcttctccatccagtggcctggcctattgccttctggcgcatggcaggaccatatgcagtgaatgaatgaattccattaagaacattcgtgattcataggaggaggtcaaaatatcaacattaacaggagcttggaagaagctgatttccaccctcatgaatgacttcaagggttcaggtgcatgagtaaatgacagttccatcaacagactacaactttctgccctagttaacacagggcatctccatgtccccagttctccctatgggcatttttctctttgaaattccaaatcttttctgttctagaagcacgaaactacaagttctctctcaactcttcaaatgaggttggaacaaacagaatgggggcatgaacttttttccccataactttaataaacaacagttttagcctcagtaggctttatgcaagccttcaacatctttttctaggtatcttgacactcatgttctttttcttcttgcagcctatggaaattcctagagacagataaatgtgcaaacctgttcatcttgccaagaaaaatccgcttttctgccacagaaacaaaatattgggaaagagtcttgtggtgaaacacccatcgttctctgctaaaacatttggttgctactgtgtagactcagcttaagtcatggaattctagaggatgtatctcacaagtaggatcaagaacaagcccaacagtaatctgcatcataagctgatttgataccatggcactgacaatgggcactgatttgataccatggcactgacaatgggcacacagggaacaggaaatgggaatgagagcaagggttgggttgtgttcgtggaacacataggttttttttttttaactttctctttctaaaatatttcattttgatggaggtgaaatttatataagatgaaattaaccattttaaagtaaacaattccgtggcaactagatatcatgatgtgcaaccagcatctctgtctagttccaaatattttcatcaccccaaaagcaagacccataaccattatgcaagtgttcctatttccccctcctcccagctcctggaaacccaccaatctactttgttgctatggctttacctattctggatatttcatataaatggaatcatatagtgtctgtcttctttcactagtatgttttcaagtctcctccatggtgtagcgtgcatcagtacttcattctttttatggctgaataatattgcattgtcagg

SEQ ID NO: 1550 - DNA, 1893 bp, Homo sapiens
gccgagagcggtggatcacgcctgtaatcccagcgctttgggaggccgaagcgggcggatcacgaggtcaggaaatcgagaccatcctggctaacacggcatgggtagcaagaaactaaaacgagtgggtttatcacaagagctgtgtgaccgtctgagtagacatcagatccttacctgtcaggactttttatgtctttccccactggagcttatgaaggtgactggtctgagttatcgaggtgtccatgaacttctatgtatggtcagcagggcctgtgccccaaagatgcaaacggcttatgggataaaagcacaaaggtctgctgatttctcaccagcattcttatctactaccctttctgctttggacgaagccctgcatggtggtgtggcttgtggatccctcacagagattacaggtccaccaggttgtggaaaaactcagttttgtataatgatgagcattttggctacattacccaccaacatgggaggattagaaggagctgtggtgtacattgacacagagtctgcatttagtgctgaaagactggttgaaatagcagaatcccgttttcccagatattttaacactgaagaaaagttacttttgacaagtagtaaagttcatctttatcgggaactcacctgtgatgaagttctacaaaggattgaatctttggaagaagaaattatctcaaaaggaattaaacttgtgattcttgactctgttgcttctgtggtcagaaaggagtttgatgcacaacttcaaggcaatctcaaagaaagaaacaagttcttggcaagagaggcatcctccttgaagtatttggctgaggagttttcaatcccagttatcttgacgaatcagattacaacccatctgagtggagccctggcttctcaggcagacctggtgtctccagctgatgatttgtccctgtctgaaggcacttctggatccagctgtgtgatagccgcactaggaaatacctggagtcacagtgtgaatacccggctgatcctccagtaccttgattcagagagaagacagattcttattgccaagtcccctctggctcccttcacctcatttgtctacaccatcaaggaggaaggcctggttcttcaagcctatggaaattcctagagacagataaatgtgcaaacctgttcatcttgccaagaaaaatccgcttttctgccacagaaacaaaatattgggaaagagtcttgtggtgaaacacccatcgttctctgctaaaacatttggttgctactgtgtagactcagcttaagtcatggaattctagaggatgtatctcacaagtaggatcaagaacaagcccaacagtaatctgcatcataagctgatttgataccatggcactgacaatgggcactgatttgataccatggcactgacaatgggcacacagggaacaggaaatgggaatgagagcaagggttgggttgtgttcgtggaacacataggttttttttttttaactttctctttctaaaatatttcattttgatggaggtgaaatttatataagatgaaattaaccattttaaagtaaacaattccgtggcaactagatatcatgatgtgcaaccagcatctctgtctagttccaaatattttcatcaccccaaaagcaagacccataaccattatgcaagtgttcctatttccccctcctcccagctcctggaaacccaccaatctactttgttgctatggctttacctattctggatatttcatataaatggaatcatatagtgtctgtcttctttcactagtatgttttcaagtctcctccatggtgtagcgtgcatcagtacttcattctttttatggctgaataatattgcattgtcagg

SEQ ID NO: 1551 - protein, 346 aa, Homo sapiens
MGSKKLKRVGLSQELCDRLSRHQILTCQDFLCLSPLELMKVTGLSYRGVHELLCMVSRACAPKMQTAYGIKAQRSADFSPAFLSTTLSALDEALHGGVACGSLTEITGPPGCGKTQFCIMMSILATLPTNMGGLEGAVVYIDTESAFSAERLVEIAESRFPRYFNTEEKLLLTSSKVHLYRELTCDEVLQRIESLEEEIISKGIKLVILDSVASVVRKEFDAQLQGNLKERNKFLAREASSLKYLAEEFSIPVILTNQITTHLSGASQADLVSPADDLSLSEGTSGSSCVIAALGNTWSHSVNTRLILQYLDSRQILIAKSPLAPFTSFVYTIKEEGLVLQAYGNS

SEQ ID NO: 1552 - DNA, 1757 bp, Homo sapiens
gcgttttccgcggggaaactgtgtaaagggtggggaaacttgaaagttggatgctgcagacccggcatgggtagcaagaaactaaaacgagtgggtttatcacaagagctgtgtgaccgtctgagtagacatcagatccttacctgtcaggactttttatgtctttccccactggagcttatgaaggtgactggtctgagttatcgaggtgtccatgaacttctatgtatggtcagcagggcctgtgccccaaagatgcaaacggcttatgggataaaagcacaaaggtctgctgatttctcaccagcattcttatctactaccctttctgctttggacgaagccctgcatggtggtgtggcttgtggatccctcacagagattacaggtccaccaggttgtggaaaaactcagttttgtataatgatgagcattttggctacattacccaccaacatgggaggattagaaggagctgtggtgtacattgacacagagtctgcatttagtgctgaaagactggttgaaatagcagaatcccgttttcccagatattttaacactgaagaaaagttacttttgacaagtagtaaagttcatctttatcgggaactcacctgtgatgaagttctacaaaggattgaatctttggaagaagaaattatctcaaaaggaattaaacttgtgattcttgactctgttgcttctgtggtcagaaaggagtttgatgcacaacttcaaggcaatctcaaagaaagaaacaagttcttggcaagagaggcatcctccttgaagtatttggctgaggagttttcaatcccagttatcttgacgaatcagattacaacccatctgagtggagccctggcttctcaggcagacctggtgtctccagctgatgatttgtccctgtctgaaggcacttctggatccagctgtgtgatagccgcactaggaaatacctggagtcacagtgtgaatacccggctgatcctccagtaccttgattcagagagaagacaggtgggtgctttgacagtattctctgactatgaaggtcggggaatgagatataccaagcaatctgagcgtcttctgaaaatgctggccgcattgtctgtcctgagccagcagcagctattagggcataaagaaaccagcatttctgcttgtcccaacaacagttataataaagtggggagacaagtcacacacaggaaaaaacataagaatattcttattgccaagtcccctctggctcccttcacctcatttgtctacaccatcaaggaggaaggcctggttcttcaaggccaagagaagccatagggatactgtgacctttgtctagagttgatgggggtgtgatttgtgaaataaaacaggaccgtactgcttggaagaaggaaacggaagctgacataatggggattaattagttgattgctgttgagatggtaacagatttgctcctaaaccattgagctagcgatttcagacctagcagggaaggtgaagatgaagaagcctttgttcaggtctctagatgtgtagggctgagggctttgccgccatgggatgtcaacagccataataataatttgcacttatatagcacctttcaaccaggcacctcaaagcggtttaaccacattaattaattaaagcccacaatcctcctggggagaggaggaggatgactaacaagatttgtaattacaggagggaacatttccgaataaagtattgtctaccag

SEQ ID NO: 1553 - protein, 412 aa, Homo sapiens
MGSKKLKRVGLSQELCDRLSRHQILTCQDFLCLSPLELMKVTGLSYRGVHELLCMVSRACAPKMQTAYGIKAQRSADFSPAFLSTTLSALDEALHGGVACGSLTEITGPPGCGKTQFCIMMSILATLPTNMGGLEGAVVYIDTESAFSAERLVEIAESRFPRYFNTEEKLLLTSSKVHLYRELTCDEVLQRIESLEEEIISKGIKLVILDSVASVVRKEFDAQLQGNLKERNKFLAREASSLKYLAEEFSIPVILTNQITTHLSGASQADLVSPADDLSLSEGTSGSSCVIAALGNTWSHSVNTRLILQYLDSRQVGALTVFSDYEGRGMRYTKQSLLKMLAALSVLSQQQLLGHKETSISACPNNSYNKVGRQVTKKHKNILIAKSPLAPFTSFVYTIKEEGLVLQGQEKP

SEQ ID NO: 1554 - DNA, 1859 bp, Homo sapiens
gcgttttccgcggggaaactgtgtaaagggtggggaaacttgaaagttggatgctgcagacccggcatgggtagcaagaaactaaaacgagtgggtttatcacaagagctgtgtgaccgtctgagtagacatcagatccttacctgtcaggactttttatgtctttccccactggagcttatgaaggtgactggtctgagttatcgaggtgtccatgaacttctatgtatggtcagcagggcctgtgccccaaagatgcaaacggcttatgggataaaagcacaaaggtctgctgatttctcaccagcattcttatctactaccctttctgctttggacgaagccctgcatggtggtgtggcttgtggatccctcacagagattacaggtccaccaggttgtggaaaaactcagttttgtataatgatgagcattttggctacattacccaccaacatgggaggattagaaggagctgtggtgtacattgacacagagtctgcatttagtgctgaaagactggttgaaatagcagaatcccgttttcccagatattttaacactgaagaaaagttacttttgacaagtagtaaagttcatctttatcgggaactcacctgtgatgaagttctacaaaggattgaatctttggaagaagaaattatctcaaaaggaattaaacttgtgattcttgactctgttgcttctgtggtcagaaaggagtttgatgcacaacttcaaggcaatctcaaagaaagaaacaagttcttggcaagagaggcatcctccttgaagtatttggctgaggagttttcaatcccagttatcttgacgaatcagattacaacccatctgagtggagccctggcttctcaggcagacctggtgtctccagctgatgatttgtccctgtctgaaggcacttctggatccagctgtgtgatagccgcactaggaaatacctggagtcacagtgtgaatacccggctgatcctccagtaccttgattcagagagaagacagattcttattgccaagtcccctctggctcccttcacctcatttgtctacaccatcaaggaggaaggcctggttcttcaagcctatggaaattcctagagacagataaatgtgcaaacctgttcatcttgccaagaaaaatccgcttttctgccacagaaacaaaatattgggaaagagtcttgtggtgaaacacccatcgttctctgctaaaacatttggttgctactgtgtagactcagcttaagtcatggaattctagaggatgtatctcacaagtaggatcaagaacaagcccaacagtaatctgcatcataagctgatttgataccatggcactgacaatgggcactgatttgataccatggcactgacaatgggcacacagggaacaggaaatgggaatgagagcaagggttgggttgtgttcgtggaacacataggttttttttttttaactttctctttctaaaatatttcattttgatggaggtgaaatttatataagatgaaattaaccattttaaagtaaacaattccgtggcaactagatatcatgatgtgcaaccagcatctctgtctagttccaaatattttcatcaccccaaaagcaagacccataaccattatgcaagtgttcctatttccccctcctcccagctcctggaaacccaccaatctactttgttgctatggctttacctattctggatatttcatataaatggaatcatatagtgtctgtcttctttcactagtatgttttcaagtctcctccatggtgtagcgtgcatcagtacttcattctttttatggctgaataatattgcattgtcagg

SEQ ID NO: 1555 - protein, 346 aa, Homo sapiens; identical to SEQ ID NO: 1551

SEQ ID NO: 1556 - DNA, 40607 bp, Mus musculus
  misc_feature (1)...(40607): n = A,T,C or G
aggccaagggctagggagtcggggaggcagcatctgcccctgctgcacttgtttcttatggccttgaccacccctcacccacttcctctcacatgccggccatcttaccctatgcaccctgctctgtggtccacttggaggctcctgggaagctgcagtatctagggaggagtctggactcccctgcactcacccccgcaccccagctctgccctgctcttctgcttagtgctcaggcctctggccaccagggtctgtgctgctcactctgccacacagcggaggcacccacccaacactcctgggaagcaggcaagtcctagacttgttgcccattggctgagattttgaggtactgccaagactttgtacacgcctcagtttaccatctggccaacaggtcaagatggacatttccagggagggtgccaagaggcccgtgccgtctaggaatggagctggaggcttagtaaagaccagcggggaggagtccacagaccagaggggccccaggaagcctcccctcccagggttcaagatccccttcttctcatcaccatggcaacagctgccttctcctcctcccgcactgggaagcttgggctgagtcatgggctcatctgggaacatgacagggcctcctgcaggacagtggcttccatccaggcttcgtgggaggcacggccagtgtggggcaggggagggctgggcacctcctcccaggacttacatctgaggccagaactgggaaagccacaggaattggcccaagaactgtcaggcccttccggtaccagcttagggtggccaggactccctctgccccaaacttggcccaagcagaatgggacatgcacatgctgaggccgttctactccatctgccagagggcctggtaagatggtggacaaagcctggagggctcatgggacatctgcacccctatgcaatggccagcacagggaggtgtaggggaactcacctagactcctaaccatcagcctggagcccagccacccaccagagcgggctaagagggaatgagggggaaaacagccaagcctctggtccagctgtaccctgaaagaagtgtgaagtaatgtggagggggagatgagagagcaaaggacacacagtctggggtttgcctggacggtttggaggaggcggagaaccacaaccacagaatcaatcttagatccaagaccctgcccttcctcgcatcatcctgcctctctgggtttcctctcccaatctcccgcaccagggggaagaggctgcccggcactaggcccagtccactcaccccactgggcatgagcacctcttggactgagtccccaggtcacccaccacccccactcccagcctagcaaaccccacttttcccaaccccgagaatcatcacagccatcgtcacctgcggttggctttattacactgccatcgtgaccaacagagtatgtggaataggaagacggcgctcatttctaggaatggtgcagctgaccgcaagcagggctgtgcaaagatcccagccaaacctgggcagaactgtcctgtggagtcatttctcagtggtccctccaggggcggagcagcagtgagaccacaggcaggaacagtagctgggttggccctgggagctccacacagcagaaagcacctggaccccttctacagctgtcctgtgctctccacacaggcagcgtatcagacatatacatacacgcaactgaaccatgccagttataaacatataaccagtcaccattctttgttaatttcacagtaactgtgcaccaaagacaacaagagtccagtgttgactcagggtaggcaacctgccctgggaaagcaagcactagaggaaaaaccaacacaggggtgttctgcctgcatacatgtagtactacacacacacacacacacacacacacacaacggggttgggtgagggagggagggagggagtgagcgagcgatcactcagtcacagggtcctaccagcctctccagaggtggagtcagaagccaggacagcactgtctcttctccagcactgcagcctgtcctgggcctccagtcttggagcatcactgatcagaatcagcttcccagggcagccatggacatagtaggcgagcacagagacggttaggagatgaacagtggatctggccaccttggggagaccaactgtcacttcactccagaccaagcaaacaaataaatacatcaagtgttagcagaagacacatgacttagacttgcccaactgtcctctgggccacttgcaatcagcagagacagccctgttggggagagggcaggttgtttcaggcagcgctaccacttgctgaggccacccccatcctgccccacacccttcctgaaatgaccaaggcttgcttggtgtgcaggtcgtcaaagtaaggtggcccatatccacagcagaggcagagggcaaagttcttcacatttcaagggcaccagccttccttccagggctgtagatgaagggacaatctgcctcctttctccctgtgacagctgctcctactcatgcccctcggcaggaggtggtgcggcgagcattactcctgttaaagctggccaagctctggccttgggtgtgcggtgcctgggaatgaccacggctccagggagaccctcagaaagcagcagagcgactcccagggtcaggcctgctggaacacagcatcagcttcaacatgcaaagcttggttcatggcaaaatctgccatcaccagccccatgaagccagtaggggacacttgcaggatcttcaaccagtaggggacacatagtggccttgggaggctccagctattaaagacaatccatttccaaattctccttcgttgtccaaagtcccactccagggacacccagcttcagctgccctcctcatgatgctcggggtccctgctggagctatgcctcctgaaaggccagctgcatctctatggcccctgctggtacttgttgtgcctgaggccttctcaacaggggctcctgctgtcactcaccaggaatggcctgctcactcagtgcaccctgttaagacacttgcattaatgactttcttgacaagttgagtcattccatcgtggcattaggcaaacaaggacactctcaagtctcccagcaggacagggaagctccagggcaggaaaactgagttacctctcactgcccagtgtgcgggcaggccaggcactctagaaccttgctagagaggacagtgaggaagaaagtgtccctaactgggcagggtacaacctcaggtgtgaggtggggagaaggagagaaggcggcaacccatccaagaagcagcaacattcattcaggttggctggtgcaaccttctagccttggggtagtgctaccaccggcctgtgcttttttcctctgccccagagtcccacccaggagaccctgccccttttctccctccaccttgggggggatacagaaaaacacttcacacaagcaagggcttgactaggccatagtggaacttgcggacatggcggtacaggtcaccggactgtgtgaatctgcgctcacaccagcggcaggcatggggcttctcccgcgtgtggaccacagcatgccggcttaagttgtgtgagtactggaagctcttgccacactgcacgcaggtatagggcttctccccagagtgtgtccgttcatgcctcttcagggtgtatgtgcaggagaaggtcttgctgcagagtgggcacgtgggcacggacccctcgggggagagcctggcacggacactgtcccgctcccggaagtgggcgctgagatgcagctgcagtgcgtgggtgctagggaacagcttgcagcatagcgggcaaatgcaaaggtgcctgctgggacccagctcttcactgtcgagcactggctctgcaggcagcccaagctgctggctgcccgtcccttcgatgtgcagtggctccaagtccactgccaggccctgggctgcagaagcacagactggtggtggggatcggtccgcgctctgcgggctgctgctatcttgttctgagaacgaatcttgctcagccttcaccagaggctgcgccacttgctgtacggagctgcagagggatgtctggaggcgacagggtgggtgtacctgctccggtcttgggctaggcttcagtgacaggtccagggccccacttgactgctctgcaacctgccaagacggaggtccaaatgttggcaggggatgggtagccttgacccctagagatgggtgtttggcctttggtgcggcttggcagaaggcaggggaccaggaaggcagggggtgtggtggctgcccaggaagctctgtccccagcgtacgggtctccagatctgggtccttctttctgagtctgcccttgcagaccttgacgatgtcatacatgtgcaggtaactggcggcagccaggacgtcctcgacaggtaggttgtgcaggtccaagcggccctcgtacatgaagtccagcaggcggctgaaggcgggtaccgtgacgatgtcgccgttgagccgcaccgtgtcgcggctgctcgcgggctgatccctgtagaagagatggaagtagacactgcacgcggccagtacagcgcggtgcgcagggaagcgcgcgtcgcccaccagaacagtgcagtcgcacaggaaccccagctcgcgctgctgcctcaggcggcccagcagccgtacgccgtgctccgggaactccatgccgccgcagtcatcacctgggcacaaacgggacgcctgtcaacacgccggggatgccgtggcccccgctcgccccgacgcgcccttcccgggtgcaggcagcccacagagaggcgcgggagtgacgcgcgcaaccgccagccctgagctgccccggcacctgcccggagcaggaaaaactcgatcgaaagtaaacagaagccgctctgccgccggggcggggctcggggcgcagcggaggggccgagccgcgcggacagaaagaagtcaggacttcaggctgcctcgcccccccccccccgcctgccgcgccccccgacgccagagtcgccgcccgcccgcaccgccgccagctgccaccgctgccgtcggccccatttatggcagcgcggnnnnnnnnnnnnnnnnnnnnnnnnnnnnnnnnnnnnnnnnnnnnnnnnnnnnnnnnnnnnnnnnnnnnnnnnnnnnnnnnnnnnnnnnnnnnnnnnnnnnnnnnnnnnnnnnnnnnnnnnnnnnnnnnnnnnnnnnnnnnnnnnnnnnnnnnnnnnnnnnnnnnnnnnnnnnnnnnnnnnnnnnnnnnnnnnnnnnnnnnnnnnnnnnnnnnnnnnnnnnnnnnnnnnnnnnnnnnncaacgcctgctgcttgccccgccccgaagagcgaaactcccggctggagctggagggggcggaccgggcgacttcccggagcggccgaaccgctgaggtcacctcgctaccccttctctgtccgccccacccggtcagtcccgctagaagctagcccgccgcactctgtgacgggagggggtgcgggaccctctcgcgatacttgtctcctgggcctctgtgtcctccatggggtcccgactgccctggtggacaaaggggcagttgcttctccgtggactacgggacaatggcctcggacccgttggaagacggtccttcagatgggtcagggcgccaatgagagaccacaaatgtcaaaaagaaattcacttcgccctatgaagatttctcttgaattcacgttaacacatctgggacaggccgtggagctggggtctcagagagagaattaccgccctctgcagaccctgggctgacagtcaagcgcactaagatctgtgacagagggcactgggtagggcagatgtggtgggatgggtttaagacacaatcacagagaagtggcaggagacctccggagttaggcagacaggtcacacacaggatgtaggaggagtgatatggagagaggccagggccggcaccctgggcacagtgttccaggggaatcagggtcagcagggtttgaggagactcctgcttcttctggggagaggacgtgacaatagagcccggggtttagaggagtcgaggccccttggcatgggctacaccaatggctcccaagtgtgcaggcggaggggtattcttagctgagggggcttgaagttgcttgagacatcgctcacgttgagcttcattaagcttgtcagttagacactctcatttacagttctagcgtgagggaggggccacgcagtaccaaatcacagggccagagttcctatggggctaggcccgttccgaattttcaccttgcatttgttagaagtccagggaccaataatgttgggtgggcaccacatagagagctggagggtaagtatgaaggaggtcttgcacaggaattacagggaaaggggtttgggtagaatatccaaaggcattctgggtagagacagccgctgagtcctgtctctccccccaaccccctgcccggctcattagacactcagaacagagtacccagttgtgaagtggggctttctggctgttggggacagctccagggggcctgttcaaagttgtattggaagcccaagggggctcccagggttcctggaggacctagattctacagggaagaaaaccagtgttgtactaaacggaggttgaagcagggatatttcaagttctagaccagcctgagctacatggcaaggcccagtctcaacttcctgccctggaaaagaaatgtatgtgtctgaaatgcacatttgactatattttcttcatctggcacctgcagtaagaagcctagagtcacctggcagttatccaggcactgcatggctgaggggcggagcttggctgcccccaacataggagcccggccgggggagggccagttccctctgactgtccaagtatttaccaccactctacctctgtaggaatggcccacatcctatgttcagagtaagcccagatcctaccgtccctctctggagcctgcctctgcctcagcccctcccagaattagcatgattctgagccccaatatccgtggttctcaaccttcctaatgcttcaaccttttaataatacagttcttcatgttgtggtgactcctaactataaaattattttttgtcgctacttcataaatttaatcttgccacttttacgaatcgtcctgtgaaccatctgcttttctgatgatcttaggcgacctctatgaaagggtcattttatccccaatgggtcgtgacccacaggttgagaaccactgccctacccccttaataataaatacctctgctactggggactagcaacacgggaatcagagcatattctagggacctgtgaaaattaacttcagggcataccgtaaggcgatgtgcctgtggtcctgggatgttctttccaaagtccctgacacggtctctcctctttattcctgcctttgcttgaaggtcacgtctttagtgagttcctccctgatccctcttgacctgcaacccatcctgcatgggacctgtgcagagtccaaggttgtccatcaaggtgcgtccctgttcctttagcaggccacgcttgtgtgcctaagcctgccacagaacggttcttgagaaaatgatggctggatgttgaacactgacaccaaccagccccccttttccctcttcctccatgttgggcaatgcctcacagccttgcctctcacttaccctacataggtcttagggcagagaacctgtgaggtacaaagacagtgaaagtgctgcctgcaggaccagccacacctgcagggtcactggacattcctcagactggtccaccatctgtgctgagaaccctgacacctgccactccgagatgcctctctactggcatatagatgacagaggctatcacagagccacagtccggctgctacaggcagaacctctctagatttcgggtgccatctaacttgggagctgtctcaagagcatatctcactatgtagctgatgcccagacctcttagctcaggatagtgcctgcatcctaccaagctgccagggatgagagggaggaagacctctgtgagaagggggaagacctctgtgaggggggaagagggtcaggaaccacaggttggtttgtttgtttttggtttttggtttttttttttgaagatttatttattattatacataagtactgtagctgtcttcagacgcaccagaagggggcgtcagatctcattacgggtggttgtgagccaccacgtggttgctgggatttgaactcaggaccttcggaagagcagtcatcttacccgctgagccatctcgccagcccccgggaccagtttttgttggagagcatggctgcagagcaggccagtggcaagtctcagtaaggcggaccttactcaccttgtggctctgtctaggaggcccaaagaggtgttgccaaagtgtggacccagaaggagtcgcctatcccccaacccactccggactcgggggaagatagagacacaaagaagggaggcgggactggttactgcatagaaacagggctcaccacaggtaggagctgtctccaacagtggcttccaggaagagcatccgagtgagaagggtcactagagaacagccagaaattgctgtgttccacaagagggcgccctgctggctctaactgtgtagcaacgggatgggggaagtaggagaggaggagttgggggcctggggtgaaggtttgctgggcgagtgatggatatttgtgtgactctcagcctctgaaggccactctcagggtcagggatactgctggagcagaacagaactgctgctgagcctctgacttagcgccctggaggctctctgagctggggcagctgtgcagcagatagggcacagaacagagccccccatccccatccccgtctgatgagtatggggcgtggctgagaggagagtgagttcttctccgggagtggggcgtgcttcccaggtcagccccaggagcccgagaaggagctccgatttccatcctgggcgatagcgtggactactaaatctaccctcttgtttacactcctggtgaactctgacccttgtatgaaaaacaaaaaatgccccctggttaaaaataccaaacacatgaaggtaaattcacaaaagggttactatcaaggcttctgggatgagggaggggccctgcgcaggaactgctgaggctggccgaagggggaaggactgaggatggataagaggcaggaaccaccttgactcttcaattccgggacaccataaggaaccgccccccaagcctcacccatctgagtccacagcaaggtcttggctgactgagtcctacccctgaatctgccccctctgggtgtccaggtgtgctcccgtcctccctgtcacctggggagtccttatcagttgctgtggcaggcagtactgggttggatgagccctcaatagccttccttcttgtgtaggctggcctttaggacaccggtgaccggtctctcccggctcccaagatggggacagttgggcctcttgagagtcaaactgattcacttcccacgctggcctccctccttggggtctggagagctaggccgggaagggccaggtcccacaaaccgggaaacccagaccagagctggacctctggatctgcggcggggctccgttacccgcgtggccctggctcggggccacccgagggcggcgcctgcggggccgcgctcgcgctcacggggtgcctcgccctggccgcgggccgcgccgggggcgcccggggcggcggaggcggatgtgggcgggcggcgcgggcgcggggcggggagaaggcgggccggcggcggcggcggcagcaccgagtcggcgggcggccggcccagcgcggcagcgcacgcgagtccgggaccagcggagcggaccgagcagcgtcctgtggccggcaccgcggcggcccagannnnnnnnnnnnnnnnnnnnnnnnnnnnnnnnnnnnnnnnnnnnnnnnnnnnnnnnnnnnnnnnnnnnnnnnnnnnnnnnnnnnnnnnnnnnnnnnnnnnnnnnnnnnnnnnnnnnnnnnnnnnnnnnnnnnnnnnnnnnnnnnnnnnnnnnnnnnnnnnnnnnnnnnnnnnnnnnnnnnnnnnnnnnnnnnnnnnnnnnnnnnnnnnnnnnnnnnnnnnnnnnnnnnnnnnnnnnnnnnnnnnnnnnnnnnnnnnnnnnnnnnnnnnnnnnnnnnnnnnnnnnnnnnnnnnnnnnnnnnnnnnnnnnnnnnnnnnnnnnnnnnnnnnnnnnnnnnnnnnnnnnnnnnnnnnnnnnnnnnnnnnnnnnnnnnnnnnnnnnnnnnnnnnnnnnnnnnnnnnnnnnnnnnnnnnnnnnnncccggctaggcccagtcgcccgcacgcggcggcccggtgagtgcccgcgccgcgccctgttccgggccgcggccaccccgctttgttcccggccgcgccgcgcctcggagtaggagcaggaagtggccgagcggaggcctgggcggggagcgcgcggggccgggctggtcgcgcaggaggcccacgccggcgagggtgcgggcggccgctgcgtgaccttgggtggccgctccacggggccaggtcgcgggagaggggcgctgttggtgtgcgcagtgggggccggtgcgccctggggcctggggctgcccgggcactcggccagcgagggtaggagaaaggctcgccccgcggcctgcgtgcggtgggagggccctgggaaggagaactcatttcccacggacagaaagttgtgcgcggtggcacagtgcccaggctagcccacaaaggactgctaaccctcctgggcccggaagctgcttcctggactaggaggtttctggaggtgccggggccttgaggacggcgtggactcggtctcccggatccgggatactggctgagctgatggaattgtctaaagaggactggtttctaagttgggcggtggtggaaccttgggcctctgctgtgtggccaaactcctccttcccacaggcccctggtcttgctccaggtggctagccttgactgcctagagccatcactaaagtgaagggcgagtcgccttggtggggccccagctgggcgtgtggctcacgggccagtgtcccagaggggctgaactcttaagacttaacaatagcaaccatatgcccttacggcatggcatggtgggaagagtgtcccatgcttaagtcggcttgatgtggacattggcgttaacatggctgtgtttcttcactccgtgtgtatgaatttatttttacacggctctggacagctgactgtcatcagcagaccttggggctgggtgggggtaggggacatccaccgagagagatcttgcagtacagccctctgcctccaggccacacccactctgacagtcactgagctgggatttcttcttggcttatctttttcgttctggcttttagtcgccacctgcttgctgagggaagggctctttccttcttgggccaggtgtggtctttcctactttggcatttggcatttgacacatagcagccggcctcccttttgttccacatttagcttcatacaaggcaaagtgacagagactctgggtgccagcttgtgtcttctgggctagagagatgacatagggggttgccagtcagctgtagtagaccctagttgggatctattccacggcggccttccagtcttttcctggggattgtccacatgaactccaggtggagggacaacacaggcttgctggtcaagggctgttcaggtgcactttcccagaatgtccagacttggggatatttgaaggatacctaggtgtccctctggaagagaagcaattggggggcggggggatctttgcgaggtgagctggcaccctttgctttgcacaggctagctagttggccgctgcaggacccttgtgtgttacctgccctgtttgtgggctcccggatactgtaattgtgggtcgtaaccactgctttgggtgttcccagcaggctgtctcagagtctctctgtctcaggcgtagggtgaaggctcgacagaaccatatgtgcctagtgtgtactcaccaagtgaaggggacagcttcacaggcagggtgctgtgttcccaaggggtctggggttctgcctgaggagtttttagtgttgtcctgaaggactttgggctcagcttcataccgtgcctgttctacttgtgctctccagtgttggccttcccgcgttcctaacgtgagccgtagggaccctgcgacctgcagtaggcctcccagactgtagggggtggtgagacagtggtaagcacccctcactagtgcgaggcagagcagaagcagtcagggctgcctggaggaggtggcctaatctgctggggtagcaaattgaacaagctgcctaacaggaaaagccttctggaaatgaatgtttctagcagagaccaggatgatgggggttggccacagccttgcaccccggactaccaggcctagatctgggtgtgtagcatctactactggagggaggtcttctatagcaacctttggagacacgtcaggcaggctggcagggagtaagggtgaggagggaacctgggaaccagagatgggtagatcacatgaggggacatgggtaattgtgggccctctggggctcacggaagctagtcccaagtgggaccttgtctcacgtgctttctcggcttcttctagacgctgcggccaggccggctgggctcagcctaccgagaagagactctgagcatcatccctgggttacccctgtctctgggggccacggataccatgaacgacgtagccattgtgaaggagggctggctgcacaaacgaggtaagtccgcactccacaggagaagcaggccggcctgggtctgcctagctcttcaatgtggaaccggggcgggggtggtggtggtggtggtggggtctttactgacccagcaggccctatcagaaagtgcttgctgtgtctaggcctagcagacagaaggggcacctccccatcatggggctctaggcctgcttcaggagtgtgcaggcccagcttttcccatagtatggaggtcacggcctcctcctggggcctcttggccagaggctgaggccctgtgcggggcctgccatgagtggcttgggggtggggccagctgcagcagcctcacgcctggctttcctggaaggcagcaaggacgtggctgctgttccagggctggcagacgagtagcctgggcactgcccaagggctcctgagggcaggcagggcagggcagggcagggttgctcggctgggccctttgcccacctcaggcccggattcctgaagtcagggggctcagaactgaaaagctgactgagatggactcttcccaggcctggggcccctcacctccagcctacccgccattcttcctccagcctgccaggagtaagtttcaaagccagttcccccaggatagtcacttgctcttgccccagggcaggcatctcacccccttctgacttcctcttcctgtagacctgttccctccggaagccctagggtgatccttgccagtcccagcctctccttccactctccttcctggctctctagagaggggattgtacttttgggtgtcaggaggaggactcagatagagaagatgggaggtggggaccgaagttggtgttaggacatggggctttattagagtatctatagctctggcagaactggggggtcggaggttggtgctcaggagctacgggaagttggggaggatggttgggacccaggagggctcacgcaggggtggaagatgtggtcagatgtgttgagaggtcccaatctggcggctgcagggcagattctgtgctgggctttgccaggaggctgtgacctttggctcctgcccccacctgacttcccatttgttctccagggcatccttccctggcccactaggagtcctgcctcctaagctcacattcctgggtcatgccctgctgtctgcctctttggctcctccttctccccaaccctaggccatacacagtctacacagtctatttcatgggcacgtgtgtattgtatggctgtcagagttagggccaacctcgagattgctgggcctctctccccaggtaggaacccttctgaggcctagggagtgtcatattgctccttatgactgagctttctcaaggggccaggtggcacaggacattaggtcctatggacacgctgaggctgtgcttgaacctgatttggcagtgctgtcattgtccctcttcaggagaagaaggtcattgagttctttaggccttgattttccccgtgcatgccctggaaatggtggtgggttaaagacgtgagagcatgcgttagctgtgggatggcaagggggcacaacgcctgcctgtctgccccgtggaactgacaggactgcctctctttggggtggggggtcttcccagcctcaggccagagagatgtgctgtcctcatggtccttcatcctcccccagccccagccccagcctaggtagtaggggctctgctgcgcgcaatggcatctatgccacattcctggactgggtcctcctattctgccttgctctggcccagccaagacccaggcttggcctgctgctgcttgcctaggtcttggtggtcctcgtttctcccttgaacacaacgagccctgtgtgcatcactagtttggggttccagccctctccctgtcttggattgccatgttagacttctaacctgaggccattatgacttggctggggtaggcagggagggaaggttattgcagttgacccttagtgacccatgatccttcagacacctgggtatcccttatgtccctccctctgttgcttttgtaggttatagccccgcagactgggaacagaacccatctttgctaggtctcccatgtccagccaggggcttggagcacattggttctcggctcctccccaagctcccgtgggccgaccgtgccttcagggctatttgggcaaagaagagaggatgttcctcactccatggctacagagaccccaggtccaggtttctcctcctccctgggagttaggtgcctacttctcaggaagtgttccccaagccacttcctaggagctctgtttgtgctctgggccagagggtgcccagtacaggagcagacattctagttgtgcattgatctgtggctgggcgttagcttccctatgcatccaacaacatagacccgtgggagactgggcttgagctcctagagatgagaggtggctggtctgatgaacctcagtgctggtctccagatgcagaggtttggggtcgatgaaccatgtcttcttaacagccagcctggggttaagttgcaggtgtggctgaacttgtccgtgacctctgatttcagcctgcaggttgcaaatgagctgtgtactgaggccacaggcccatctgtgctaatcttttgggttcttccctcaaatctctgacgtttgccgggctgtatgcgtgagagctgccctggtagagactggagccagggagccttctcaccttcttggccaggttagccattgtctgtgtctgtgtcttcccagctcccagcaggtggctagacctgagacatggaaaggtctgagaacgaagggctatgtgtttaagagtaggtggcacatgacaattgtagggccacctcgtgcagggccacctcgtgcagggccactttgtgcagggccacctcgtgcagggccaccttgtgtggggccacgtcatgggctcactcagcagacttagttgagagacccagcaggctaggagaaaccaagctattctcactgggttagtgcctggcaggtggacgcagtttggacaaggatggagggaaactggcatgtagtatggggctctctggctttgggtgtggatctgtttgtgctgagctcatggtctctgggcagagtcaagggtcccgaacccagtgggcaagtcaacatctagggaccggagtagtgccatgcttggggactgatcctgagggagaggtaagcatgtggcattcctggagacctggacagagatggcagctgaatgctctgggcccattcatggaggggacagtacactgcggtgtgtggctgccgctgagccttggctggtgctgggactgagtttcctgttttgtgagcgtgttgagttctcccttaaaaacaaacaacaaaagaggaagctgggcggccttccactggggtgtgggggtcagtccggcccggcctggtgactccccagagtgggcagcagtcctctcggcttcctgacgaccatcttctagacagagttgcccagtggggctgagccacttggaggtcaccaggaggtgaggaaaagtgtggggacataagactccactgaactgctgggtctggggcagcctcttggtcctgccagctctgcagggtagccaagtgcactgaaaccaggaagggggtggggtgctgtgtggatggccagaaccagggcctactgtcgctgctaggagtagcttgagggcttgcatcaggctgattcctagaagtgccatggggtagtggggagaactgttctgtcctctggcaatcctctctgcccagtcacacccgagccaggcccagagccagctccaacccttaggccctccctgtaacagtagctgtggctgtcccagccatcccaccatggctggtgatctacccacacccagcacttccccagaagagtctgcctagccaagacctagactctagcccacgctggtgggcagagcagccaggagccccgtagtaccggtggcctgtctgcaggtagctgcgtgcctcactatcttttgcctctgagtggcttttgtgtcggttccccctcccccagcccccgtcctctcacccccatttagttgttttttttgagatagggtcttactttgtagcccagattgtcctgaactcaagcgagttcccttcctcggccttttcagtgctggggatatacgtggtgccactatgcctggcctcctggtatgattttgctttgttggtttgtttgggctcttggcataggacttcggaggtggtagacattgttctagagaaggcttccctgcccttggcccagggtctggctggcccatgtaggctctggtatctgtagggtgaaggcacatcctttctgctctgtctgggcctccttttaaaatgtagtgtatggtgtgtgtgtgtgtgtgtgtgtgtgtacacatgtgtgcgcgtgtgtgtgcgtgtgtgtatggtgtgtgtgtgtgtgtacatgtgtacatgtgtgtgtgtgtacgcacgcacccaggggagggggaaacgctcatgtgctgtagccagcatgcatatgttccttggacaacctgtgagttggttttcttttaccatgtggatcccagggatcaaacatgggtcgtcaggcctgagggcagtgcctttaccctctaagccatctttcaggacgctctctgggccccctgggctgtgccacagtgaggtggagagggaggatgggtaaggggagggcacagcttttgggactcagcacaggaatgttgtggggtctgtgagctgccgtgtgtctggggaagtaggacggatgagaggggttgggctggtgtagggaggctaaaagccagcataggatggtggccctgtggcttgccccaaaactgtgggactaaggtgaacaggatgatctgaatggtacgggagacttgggggtgcgtggtgtgtatggcagagtggggctgtgggccggccttcctttctggtacggggagggtggggactgctgtggaggggtaggcaagtgtaagatgtgggtgggtagggtaaagctggaccagtactccctgtggctcaggaagctggactggaggtggcagtggagaggtgtgccacccactgtgggttccaggaacctgagagaccttgggacgcattgcagtcgcgtggttgctatatcttggctcttctcagctgaggcctgcctgtgcagtttgtgtcctggctgtccctcagctctggttatttcctgcctctctgtgaccgctagggtccccttttttaagcctcggtttctccaggaagctggtggctccagtgcgtcctacttcttgctaggtgagatttttttacatttgtgggttatggcaaaaaacacacccaggcccagtggagtgccactggccattggtaccccaccctgtgagacccacatgagcacccctcacagacgggctgcatctgggctgtaccctggaacaccagacctggggtttcacctgctatggacagcacaccccctccactccctgcctttgcccagtgcttggtcattgagtctattggggtcaagtgacatgggtcctaggatctgcaaagggacctgggaggctggcctcagagatgaccttgccacctgctgaccacccactgcccagaaggcagccagagctgggctaatggccccaataggctgccatcagcaaaccgcttgctcaatgtgctggagaaggtaaatgggcgcccggcagctgtcggtgcgatggatgtgttggtggtaggggacgtttggtcgctgctgtcagctggcgcctgctccccaggcctgctggggctcactttgctgtggagaaacagctcggtgccgcctggcgccttgccagctgccgcctgccaccgccactgctactgcggcaaagtgtttatccagcagtttccccaagaatcggggacttggagagaatgttcacagtgatcaggacacaggccaggccagtgtgagaggacaccggtcgagcctgagtctcgagtgctaggattaaaggtgtgtcctgcctccctctttcctagtgtggtgacttaggtacagggggtcctggtacagggactcggaggctcacccacacagatgctggaaggcctagaccttgaggcaccagtgagtagcacctctgggtacctttcccctaggattggacagaatctggtcctggaggtggaggtgggcctgagggagccccgaagttgttggggagtccttgcctcttcctaggtgctggtcttggtgctagaaggtggaacaggtccttgggtggagtgggtcctggctgtcctctctgcatagcagctgtgacgcctcctgaatgggcttgcacatgtggatggtggagagctgggtttactgtggtgtgaggccgggcttagtcctgggtgtcttctgttctgctgttttttatttcttgtcgagaagctgttgtcaggcttctgccctcaagagccacgggaactgcattgtggaggtggcgcctggtcatttgtcatctgttcatgtgtttgttaacacgggcctggtaaggcacctgcaggtggaggagcctgcacatcttgtggaccgtgtgcacctgaatccccagggctgtgtagccaggtggagggccctggctgctgccatgctgcccagctggactcccctgagttcagggtatcaagcatccagatgggtcaagggagccaagaagatcccagatgggccagagcctagcacttctacagaggccagaatggctcaggctcagtcactccttgctggactatgaaggacttgagggagacctgccaatgtttgtattcccaaaagagaccccccccccccagggtaggcaggagtactcctagataccatggagccccagaggaccaggacagccgcctcttgtatttgtctatcatattggcccgtttctgcagtagaatgaggtttggggtctgtctggtctgaacttattaacatgcaggccacagcccaggctgcagctggctcagccggtacccccagtgaccaattggctagaccttgaggcaggatttaaagaaagagatctgtgtgtgtctgtcagagctgtggccccccctttactgtgaaagggaaagtcctcatgaggccacttcactttacagttctccttggccatgtggcctttgtgtgctttgtgtggccagggaggggaagggcacctaggccctctgtgtgtatgtggggctgggtccttaccttgtcctctgcctggtgagtgccccctgtctgtaactccgggtctacattctggaatctgccaggcctgggggctggtcatgtaggcttagagcccataggagattcagggtcatgctggtggtttatgtgtcggggccagagctggggtctgcactgggcacagtgggatgggcagcagttggcaaatcaagatggatttctggggcgcgggtgcgctgctcatcagcctccgtattcagttagtgtcccggggagcagcagctggtgagatgggagggtactccatcaggggccgacagctccagactggtgctggcgggtgggcacacacggcgggtggcccgggaaggaacaggatggggggtgggctgtgtaccccccagtgctctgctgtattactcagagcccctgcctaccacggcaccctctaggccctgtgccaggggaggggctgtcacagggctgctgggtgtgtgaatacctgcaggtgtgtgccacctggtcagaagcagggctggtgcccaaaggggtggctgtgctggagagctgggcttctgggagctaaagatgggaggtgggttgggtttacaggtgctctagaggttgcatgcgggctgtaggcccttgaagagaatcagaattaacttgcctatgccctggaggagccccggccacatctgggcacttgccaagaatccggagggctttcttgctttgctttccattgtggggccagggtctgcatcggtttgtcagacctaggtggtctgcagcgatgacaagaagacgggatccctcgctcttggagctgctcgcccctggggtgggagtcttggcctggtagtggttctattcacgtcttcccccggcctcgccaacagcctccctccatcacttcagttccctctcatcccactttgtgcagggtgtagggtcatgcagagcaaggctgctgtttggaaaggactcccaggcattggaaggggctagatggtgggaggtagattgtgggtagagccctgcagcttgctgcccagagcccctgcaggtcctgagagcatggacaggtccaagctgatacactatcctgagcagactgtatctcacctgcgaaagtgttctctgggaatacctggatttggtacacaccaccgttagaggttaaagaaggaaagctggccagcccccctggggctatggactgagactggggcaccgccttatgcccaagatcacggtgcttgacctagtgactgggtctgtgcccaggagcacccagtggtagggggtctagacaagcagtcactcatcacacatccctcaggtgaccttgtttagggcccagtggcgcaggcaggctttatcctagacagagctaagggaccccagccctgtgggttgcccctcctattctcaacctagtgtcccctcagatgaagaagttgcctaattagttagttccctgttgttcagactccttgctcggcaaaatgtaaattaaacattttttccgggtgtcagtatgaaaaatgacagtcgctgggagatcacagaggacatctgctccgattcctgagtgtggtgcctgcgtatggctgatgttgcaaaactggaaggaacagtgttcctgtgtacctgggtgaccggggtgggactcagctgggcgtagcacccctgttccagcggtggcacctcctgggtctgctgtgcaggcagagccctagatgatgctcccagctgcaggcactgccagttgtgccctggcgctagtgcttgctgggaaggcggaagtgtcccaggtcccttcttccccacctcacactgtactctccctggatcttatgtgcctgggtcctcacagtggagttcccatgcagctccttatgtctcctatcccctgcaggggaatatattaaaacctggcggccacgctacttcctcctcaagaacgatggcacctttattggctacaaggaacggcctcaggatgtggatcagcgagagtccccactcaacaacttctcagtggcacgtaagtgtcttagccatgcgggttggatggggtggctaggcaggccagcagggaggctgaaactgcccactgagaaacccgaggagagcctcctgttagtcctagggtactgggcagtactggccctgagtcacctcctctaggactggtgagtggccagctctggcagggtcagggagtccttgctagatggcggacgggtccagcatgtagtgactgaacctggtctagggggtgggttgaccagggtccctgtggattaaacagccactcaagggcattccttgggaactctagggtagacagcgggaggagaggctcccggctctaggagtgaatgacatcccaaggaccgtctctgtgattctccctgggaaggtggccatcggaagccctttgccctatgggtcttgtggttcctgttgccggagggtcagtgggagtcagccctgtccaggactggtgagggtgacagactgagagcttggggctgagatgcagtatctttgatctctgtgccacattgtcacagcccagttttatttggagctggacaagaataggtttgacagtgttaagcgacagcagtaagcccgggcggttactaactgtggactctggggtcctccttgggctgcagtctggagtgtagagtatgtgcctagcatagctgggtctccatttatcctcacagccttcttgagatgctcctgccctgcaggtagctctgtctgacctgcctcagatcctagggccttccatctctgggcacttggccagtccccaggtcttagggcttaacacaggttgctgcctctacagatggataggaaaggactcccagcttacttatgcaggaggaaggaaaggggcctctctagagcagacacataggtatatgcactggccaagggccgctgggcagtgggcagggcttggccttcaagcaggtcttgggcctcaggaggtagacagtttacgcctagctggggacaaagcagggtggggctgtgttcaggctttttatctgaggtgggttctggagggaggggttaagacccccatttggtgctagttttcatctgcttgcctgacaggctgtctcagatgtgctggagacaaggctcagggtgattttccacccctcccccaccccatgttgacataggcctttcccaaggctgggcctcaagcccctcttggccccttgcttggcaggctgccccttgctcattcattggagcctggaggcccctcacattgccaggacccagacgatggaatgtgggaggcccctcagtccctcctgcctgctttgccgtgaagccctcttgctgcatacatatcctcagggcctgggctgctcccatgatccacccttaaaggtgtgcatattctaggtgtggccaccaggtgttcatgctctgggcatccttgttctgtgtgtgctcccagtgtgaggcttgggtgctgagtacatgtgtgacttttccagagactctgtatgttgttgggaaaacagcaagatacttctgtaccggaagggggtgtgggctggatccctgaggcccccacatgaggtagggatcagcagttgaaggacagaggaacttcaggatagttatggtgtagggctaactgatctagcctgactggttccttcaccttcagagcagagcatctcagctgtggcaggtcttgggtctcagttctttgagaggaactagggcaaggagaggggatggagcagggtgtggtggctcatgctgtattcctggcactcaggaggctgaggcatgattacctcaagttcaagaccagtgtagactacatagtgagttctaggtcagtctgaattacataggaagaaaacagaaatgctagcggtggtggctagaacctgtaaaatcagcacttgagaggcagaggcaggaggatcgccatagtttgagacttccagtctacgtggagttttccagagctgcacagcaaaagaccctatatcaaacaaacaaaaagctttaaaactttaaaactttttacattttattgttttgtgtgtaaagaagggtgtttgtttattttatgtgtggatctggtgctcttagagacaggaagagggcatcagatctctggagttacagatggttgtgagttgccatatgggtgctaggaattgaacctctagtcttctggaagagcagttgtacttctaatcaatgagccatccatcgctccagcccctgaaatcaatgtgtgtgtttgcttgcttttcgagacagggtttctctgtgtagccctggctgtcctggaactcactctgtagaccaggctggcctcaaagtcacagagatccacctgtgctaggattaaaggtgttcaccaccacacctggcaaatacacttttaaagtgaggatgagattcaccttcctgggacagggttgaggtctgtctggtgaggactacgagggggagtttcacggagaaacagatagatgcttccccgacttctttagaatgccagctgatgaagacagagcggccaaggcccaacacctttatcatccgctgcctgcagtggaccacagtcattgagcgcaccttccatgtggaaacgcctgaggagcggtgagtgggcagggtatggttgctcgagagcctgaggcctctgctgagtccattctggagaactagactggagcacttgtgggatgagtggggcataatgggagaaatatcagcatcccaggtaccttgatgctcctgatactcttgagtgtatggaggcccaggatctgagtggtggcctgcagcttcaggaccagggagccaggcagctggttggtggaagccatgcaacagcgcccccaggtgcctgaggcctcacttgacccgctgcagggaagaatgggccaccgccattcagactgtggcagatggactcaagaggcaggaagaagagacgatggacttccgatcaggctcacccagtgacaactcaggggctgaagagatggaggtgtccctggccaagcccaagcaccgtgtggtgagtctgggctctgcttctgctggggctgccaggggttgtggagggacctggtaggtcctggtattcctgcctggcttcctgtatgggtctgggtacccctggctcctctggacatgggctgaggacacctcagttggcagagtgcttgtccagcgtgcatgagacatgagaccccagtacttaaaagtaagtaatatgaagatgcccgctgactcccaaggcccagcgctctgactagactgtgcagagcccttcactgactgcacaggccagcacatgtgagaatgggcctggcttgtggccagctctcttgctgttggctaacttggaggaagcttgctcactctggacactgtcaagccgaaggcggtggcatatggtttattaccataggctagttgtggtgagcaaaggctctctctaaccgggctctgtctactgcccacagaccatgaacgagtttgagtacctgaagctactgggcaagggcacctttgggaaggtgattctggtgaaagagaaggccacaggccgctactatgccatgaagatcctcaagaaggaggtcatcgtcgccaaggtgcagggagggcaggcttggagggaggctgagaggagtgggatgcaggggagataggtgctcacttggttctgcattccaggatgaggttgcccacacgcttactgagaaccgtgtcctgcagaactctaggcatcccttccttacggtaagcagtggccatcagtctggcccctgtgggatagggaagagtgggccagagtgggtcactcccacactgttgcctttgcacccatacacggacgggcaagggcttcatgggcatcaggtaggctgatggagggcggggctgcagtcatgccccagctgtagtgtgcaggaggcaggagtgagactcgtcttctcactctgctgagaccttgagttgccccagctctccatccctgcagtcctctcagacccgtcttctaggctggtccctcagggttgattgttagtgaagctcagttacagtagcttgattgagttccagagtcagcatcttgggcttattccacccgtggtccatgatggaaaggtgccggggtggctcagtgcaccagttcataagctgttgtgtcaacctccccatctggaggctcttgggaaccccagaacttggtatagttaacttctaagccatcttgccctgcagttgaacctagacctcgtgtctctcatcttaaaatctaccagttggcatgtggcctgcatctgtagcccctgctgagttctaggccagcctgggctacggtgatacccaagatgtgccctgatccatcttggggtggcagtgtcactgtgcttaggcttgccctgcttccattccaggccctcaagtactcattccagacccacgaccgcctctgctttgtcatggagtatgccaacgggggcgaggtagggccacaggcagcttcagacctgggcacttgatgggtgaacttgtccctctgagagctttgaaccctctctgtagtacagatcactggtgctgccagccctggccatgtgagcctgtagctgctcgtttggggatgtcttatttctgctgagttggagtctcgcagtctccagttctctttgggggctagttcctaaccttccctctgcctgtgggtaagggttggcgggccctcacacaggccttcctcagcgcgctccaccccacagctcttcttccacctgtctcgagagcgtgtgttctccgaggaccgggcccgcttctatggtgcggagattgtgtctgccctggactacttgcactccgagaagaacgtggtgtaccgggacctgaaggtgtgcttatggagcagggcgggtgggggctggggggtctggcctcactgactgagcgccttcccacacagctggagaacctcatgctggacaaggacgggcacatcaagataacggacttcgggctgtgcaaggaggggatcaaggacggtgccactatgaagacattctgcggaacgccggagtacctggcccctgaggtgctctgccacttcctgtgtgttcccttacatcctcccacgccccgacacaacgctgacagagtcccccatctaggtgctggaggacaacgactacggccgtgcagtggactggtgggggctgggcgtggtcatgtacgagatgatgtgtggccgcctgcccttctacaaccaggaccacgagaagctgttcgagctgatcctcatggaggagatccgcttcccgcgcacactcggccctgaggccaagtccctgctctccgggctgctcaagaaggaccctacacagaggtaagggctgccggggcttcaggctcagcctctagacagtgctgctgcccactgtacccgccacagtctcagtcacatgtcgggtggggtggtcaggcagctaggggtatccctaccctgcgagtatccccgtgacctgtcaccttgcacgcagtgtctgagccctggacctgtctcctacccacaggctcggtgggggctccgaggatgccaaggagatcatgcagcaccggttctttgccaacatcgtgtggcaggatgtgtatgagaagaaggtgtgcatctggccactgtgcccatctctggatcacatacgtgtgtgcatacatataaacactctcactctggccactgtgcccatctctggatcacatgtgtgcacacatgcaaacactcctgtttttgctggctcagacacgcatgctgggcccacagccttgtgtagtcacatgcccccacagagccacagggttgtgcacagccttctcgctcgcacagaagagggtagtatgctgccctgcatacctcgcacagtcacctggcctctccaggccctcaattgtgcccctgttgcctacacctgttgcttgctcctgtcctttgcctggagatcgcctcatgtgccctatgatgaaagctagccgagggtggggggtaatgtctaggtgtctccaactctagggcgagcctaatcccattctgggacggcccctgcccgtctggcacagtgtaggccactgcagagagcagagccccttgtactcacccctaagtgtgattctcttcagctcctaagtacccctggcccaggctgatgagggacacagcaggtggtctcaacactctaccttgatgtgttgggtgccctgttaccccctgccttgagtgtaccttctagataacacggggccagcagcatgtgggggtgtggatggcatgcctttcctgcccacactcaactagagatcccatgaagtccgcattgccctcacaccagatttgggagggatggcaattgagggtccttgcctgtgagacccaaaaggatgttagcagcctccagtgcatacaccactctgcagcttatcttcttcatgggctgtcagtgaggcaggcgagctcacctgaagactgctttgagtcctgccacagctgtggtggtgccactgtgtgcctttagtcccagcacctgggaggcaggagcaggtggatctctgagtttgaggccagcctggtttacagaggtagttcctagggctacacagaaccccagtttcaaaaaatggaaagggaagaaaaaaaaaaaaactcagaagggaaatgacaaccagagaacggagttcccactgcctggaggtgggcagtcactaccctctcgtcactttgggcatctctgggcttgctctcccctgcctacactgccctacccagttccatctcctagagctgttccctagtgctagtgcccacccgataaggtcagtattgcccagagaggatggagggattggaacccagtagtaaccaggccttctgttgctcctcagctgagcccacctttcaagccccaggtcacctctgagactgacaccaggtatttcgatgaggagttcacagctcagatgatcaccatcacgccgcctgatcaaggtgaggccaccccactccatggcccctcagtgtctggcttgcactcctgctttttttgggggggaactggagttaacaggtggttgtgagtagccacgtgggcactggaactgaacccgggtcctctaccagagcagccagtgctcttaaccactaagctctctctcagccccaaaactaaaagaatcaaacaaaccctttggagggtggtagcagcttggcggggagggagggagtgttctgagggccagagtcactgccccctcacagggcccccttgtatcctctggcatgtgtcaggtgggcgggctgtttctagagatggtctgagccctcctgtggcccacagatgacagcatggagtgtgtggacagtgagcggaggccgcacttcccccagttctcctactcagccagtggcacagcctgaggcctggggcagcggctggcagctccacgctcctctgcattgccgagtccagaagccccgcatggatcatctgaacctgatgttttgtttctcggatgcgctggggaggaaccttgccagcctccaggaccaggggaggatgtttctactgtgggcagcagcctacctcccagccaggtcaggaggaaaactatcctggggtttttcttaatttatttcatccagtttgagaccacacatgtggcctcagtgcccagaacaattagattcatgtagaaaactattaaggactgacgcgaccatgtgcaatgtgggctcatgggtctgggtgggtcccgtcactgcccccattggcctgtccaccctggccgccacctgtctctagggtccagggccaaagtccagcaagaaggcaccagaagcacctcccctgtggtatgctaactggccctctccctctgggcggggagaggtcacagctgcttcagccctagggctggatgggatggccagggctcaagtgaggttgacagaggaacaagaatccagtttgttgctgtgtcccatgctgttcagagacatttaggggattttaatcttggtgacaggagagcccctgccctcccgctcctgcgtggtggctcttagcgggtaccctgggagcgcctgcctcacgtgagcccttctcctagcacttgtccttttagatgctttccctctcccgctgtccgtcaccctggcctgtcccctcccggccagacgctggccattgctgcaccatgtcgttttttacaacattcagcttcagcatttttactattataataagaaactgtccctccaaattcaataaaaattgcttttcaagcttgtggtttgctttctggtgtggagcgtcacagccttgttagtgggtgggaggtgaaggggtgtggctggggtcacatcagggtgggtcctgggaactggtccctgaggctccaggggatgtcgtcctcatggcaggacactcctgacaaaagtgggaggatcttgactgtctctggaatctactcttgcagtgaccctccctggccatccaagacacctgctagccccagctgtcttgtgtctggcagagcaataagccaggccctgataccaggaaggataacgcgttggtgatacagttcaaaaaggctcagggggctttggttgaggtgacatagcacatctgtgactgaacagaactggggactgttctgggtctggacggaggtgacaggagccaaggtcactctagagtgtctgcgatcctgagtccaagccgccaccaagatatactgagtatgttgctggtgacacctggtgactactggtggaactgcagcaagcaacagcaactgctcagcaaaacatttagaggcctccagccagatggcctcccctaaggcatggactacacatatacagagcctagtggctggtggccttgctgggatggtgtctgactcctgcaaagttagggtgggtgatgatctggacctctggaaaataagaatatccacttctataacagccaaagattttctctagatgaccacaagccctctggaaccgtacacagcattgcctactttgggtttgtttgtttgtttgtttagagacagggtttctctgaatagccctggctgtcctggaactcactttgtagaccaggctggcctcgaactcagaaatctgcctgcctctgcctcccaagtgctaggattaaaggcgtgcgccaccactgcccagcacttactgactttgaagtaagatttatagacaacaccggctgggtaaacacctttagtcctagcacttgagttcaaggccagcaaggtcaatgtagcaagatccagtcaggagggaagagagggagggaaggaggaaggaaggaaataaggactgtagtgctttctgtggccctcagacttagcactaaatcttacctaaagtggctgaaacgtagaaacaaacacagctaaagccagggctgggccggctacaggctgctctttccacaagacccctcaggtatgtgtctctagtacagaggagggagccctgaagttgtgccctcaacacagaggtgggcaaagctctcttcctgagcccactgttactcatgaaagctgcccaacatgatcattgtaggtgagagcggacatctagggaatgctcttgggaagtggtaccctctccccgaagacaggcctggcctagcctgaaccaccagagcagataggggatagaccctgtggccatggtagggtctggtaagcttaaatgaggtaagtaattcataaggcaggaagtagaatggtgcttgctagggtggagatcggtgggaatgaggtgtgtagccacttgatgactatagtttccatttagggaaatgacctacactaaggccaagaaaggagggagcaaagtttactatttgtcttatgggaaccgagttgaaacaagaccttttgagttctgttctaggatatagttaagtgtttgtagtatagcactagagagatgtgagcaaacacctattcaccccagctaaggaaccaatgacagcagagtacagataccaccaaagcccgacctggaggaccagtgagtttgacagtggcatatgagaatataggttgtttacaggaacagagatgactcagaagacagctgcattgccaaggcatgggtgacagctcacaaaagcataccccaaaacaaactacaggcagctgaacaggctagaaagtgatctgagcctcgaggcagctcagctgatctgagaacgtttgggaggggaagccctagtgaatgtggtcagtttcagggacttcctaaagccctcaagtttgcttgctgagcttaaggagcttccctgcaggagtgttctaccatgccccaccctcaccatcctgtgtcttaaagagctctccaagatggaaaactgctacgcaacagtaatggtgacaatggctttgtcaggcatggctttcaccacaaaggagaggccaggcagtctgcattaggagagggaggcctacctacggagcatgaagatggtggtgaggatcctgcccatatcccttcttttttgtttgttttgttttgtttttttcgagacagggtttctctgtgtagccctggctgtcctggaactcactttgtagaccaggctggcctcgaactcagaaatctgcctgcctctgcctcccaagtgtaccaaagtgtattaaaggcgtgtaccaccaccgcccggcttccatatcccttctttattgggaatggggactgcttcttgttccctcccttgctctcaacaacgtgattaattaacaccatcaaggatgctttgatccactggcaatctgctgtgcaaactttggctatcctagctctcatcccccagtcttctcgatccttttcacaagctctctcaatctcctcccacaccacaggtggatgctcagcaggcagggttctcagcagaacctgggttcatctcaccccctctggggttatcatctgacgctgggtgctgtccaatatctaagtactttgttctttttttaaagttggctagggaccggggcatctgttggcaaaatgcttgccatgtaagcatgccccaagtttggcccccacaattgtatttacaaagcacagcggtggcattggtttacactcctaatgctagggaggccgacgcggggcggggggcctgaggcttgctgtccacagtttaacttaatccgtgagctccaggccaaatggggcctagcctcaaaagccaaaccacccacaaaccaaataaaacccaaacaacaccaagtagattgctggctccacacatgcaaactcaggcatgcaccccacactgacatgcacactcaaatacactccccgctacctcatggctggatgctgggcagattactacaagtctgtgacatgtaagatgtcatttgaagctacgtcacagctctcaggaatctgcatggcagctggaaggaataacaagcatccatctgtattctctatggtggatcagaaaagcctacagggctgtgcagtaaggactaggatgcttctgagcccaacccagagagacataaacgaacatacaaacacccagaggaagggcctccagccaagaagggagccaagaaggtctaaggtgaaagaaagcatgttgagcatgctgggaggtagactgaacccccagcggggcaggaagcaggagaggtaaagtctggtgtttatgagagagggcagcctgaaggtgttggggactgggcaatgattcccactggtgacagagatgggctagctacagcagaagctcatagtacaaagactctaggccaggataaaacagcaccagaagccatgggatgggtgtggggtacggtcagggtttgctttggccaccaacagccagctcaagtggcttagtggcttcaagccagctaatcgagtcaggtgtggtggcgcacgcctttagttccaaaactcaggaggcagaggcaggtggatctctgagttcaaggacagccagggctacacagtgagcccttgccacaaagaaaattaaatagacagacaaatagacagactccagttaggatccccagattccattttcagagccgcagtcgctggcctatctgggtgccctgccccgccccacccccagcaaggctacagcagctaactgctaccttgggccctaatgggcccagctcctggtcactacctacagaccaccagcttccacacttaaaaccagccagagtcccattatccacagcaataagggaacttcccaggtgcgtaaggcctttccccacctcagccctctctagcctcctgctcacgtagggcctctgggccaacttttcagtagtatagggaaacttgaaccaaccccatctaggacagcacctcctcgatatgtatgggaactaaccatagttgttcttagagatcaggacaaggagacctctgccctatctacccagccaaccacttgtaagtaggagacccaggtggctgcagtgactggcccaccattatcttccaggccatgttacctcctgtgaactccttagagccctgcataaactacctctgaagatatggtgaggactgtcacaaccacacagggacattccacagggccaaacccctggaggacaagggctcattaaatcacctggaacccagcagtgtaggtattgatggctgcctatgtgactgacagtggcaattcagtgcctgaggttgtctagcacgcaggtgaccattctgcagtctgactcctggagtccagctgcttcctcttacagctgagggaggacaggaaggaacttgctgggtctggcttgcctgttagatgtgggtaataagcaggggtctcaatgccaagacagctgagctgcacgctgctgcgagggcttgcccctgcagccgtcactgccaccctaagaacggttaacagatggaagggagggagtccttgtgcaaatataaagaggtttattcacttgttactgggtataaaacataacatataaaaagccaccttctctctctttagtgtgaacatcttgtgctgtctgtggccacctcaggcttcaaacatagcacagctggtgcacagtgtcttctcaccatcgtcggcatagctgcacagttggtgggagagagagaagatacctaagtagctgaatgcatcccctctcactgaggccctaatcgcatcacacatcagaatgggaacttgtctgaagacagactcaggtgataggcatttcagggacagtttggggacaccactgtctctggaaggaggcctagcatgcaaacatcctgtgggtcttgcatcttggttccaggcctttgtggtttaccagacgggtgagatgtcataagagacacacaggagtgacatgaagacatagcaacaagagggccactgacacaaacctgaggacctatagcagtcaccacaagcctggaggcagcctgggaaactctccctcccaccttagcatgaatcagccctaaggttcctgagacttctccccagagtacccctgcaagcactcctgatctctccaaaccactgaagagtactctgttggcgaggatttgccatatgaagtgtggttttccatctgacgcattagctttagagaatgttggggctgagcttatccggatccactgtactgatcccatactcatttggtggaacaagtccctacagtgtggaacaaagggacagggctctacactgtccacccactcactgagcacttctaaggagctgactcatctggctgcagccaatgggtaagcagcatccattccattctgctaatacacagttaacacacaggggtaggcatgacctgaatgtacatacacccagtgacgtgtgtgaggcaatcctcaaatgatacgcacgctggacagaaactgaaactagacaacagtgtggactgttggagccctaataaggactcagaagtccagaccacaaggctgtgcaagccagggagctgctttaagtaggccgcagactactgggaagcacggacttcttccaaaaggatccgagtcacccacccagcacctgtgccctgacggagagggaccgtgatcaggtcaaagcactcactctgcaaggccacacagcacacaggccaaagcaccgcagccccagcaggtgtatacacactgcccacacagggcccgctcgcactggctgcagaccgccttcccatccacagatctcatgcacgatgaacaagcgatgggcgctgtcctgggaaggcctgtgaggagaaaacaccgaggctgtcagcattggaaggacactggaagaacacgagggtgacaggcacccttcttcccctgcaaccgagtccttttggcaacctatctatcagccacctggagcactagactaaaggctcacgatgaggcattcattcccaggactggtcacaggactccaggacagatcacctgcctgttgctaggatggccggagtactctatcagaactctctatctgtctgggtctcaagatggggtttactgtttcactggtcagcccagaggcttctgggctgaagcagagtcctgtttttcacgagtcacacgagaaccacccctcaacagggaacggactggcatcttcttactgcaggtggggcaccaggagagcttgagatgccagttggaacctgttgacgtccactctggatgcctgtgagggtcagactgcccagcaacatttgctccacttaccaggctctaaggcagtggttctccaccttcctaaggctgtgaccccttaatatatacagttcctcatgttgtggtgaccccaaaccatgtaagcattttcattgctacttcataactaattttgctactgtcatgagtctcgcaacataaatatatttaaagacagagatttgtcgaagagttgtgacccacaggctgagaaccactgctctaagtagatcctgtttgcccaggtagtcaaggctcttgaacagaacactgccaccatcttccctaggtgtaacagcaggtcagccccactggcggccactcaccaccttctgaggcctgagcttggcaccgtgtcagtcggccatcaggtccaatcaacatctgtcccctcgcaggttgaggggctcctaccacaccagacttcagtgactcctgcaggtggttcacggaacaatcttcgctcgatatgtgatctctataggcccgagccccttggaaaaggagctgcttggttctttctggggaggaagagccttccttaagataactctccaaaccgcaaagcggttgcacagatatcctatgacccacaaggctcggagccccctttgcctgttcccagccaccaggctgtgctccactccggtgctcctcccattattctattgtcagcagccacagctattcacttcacctggttggtgccctctttgcactcccagtcctcctcctgtaagcttgtctcagtgccagagaaagctctggctcagaaccattcattcccaaaagcaagtgtcccaaggaggcagaaaacagacacgagtttagaacagcacctacaaccattgccaggccagtgaacaactttactaaagggacaatgacaacaaccccctgacaaagacctcccagatgttccagccctgccacccaccaaccccgggtaactggctgctcacacctataacagtggattgcttcctttcgggcttcaggcccagggagccctaaagggaaacactgttgcgagttctagaaatactcactcccacgacccagggacctctctgtgacactggaagcaaacaaaaactcaaagagagtggctattcccagctcagttgcctcctactttaagacagaattacttaagttcaaggccaggctaagatacacggtgaaagcctgtctgaaaaacaagaaatgggaagagttcctggaggggtactcttaacacaggtggggctcaaacccacattccattatgagagcaattttctccttaaggcctcctggtccagcagagtccagagtgtgggctggggttttggtaaactgtgtgtactataaaactcgctagagccctgcaccccttcctgactggctggctctgagtggcctggcaaatgctccaacacacaagtcctcagaagggtagagccaggctgttaggttccaattaacacttaggccttcttttcaactgcatgcttacatttaaaaaaaattaatttacttggctatttagttactatgagtgtggtcggaagacaactttcaggaattctctcctactgtatgttcttgggacctgactcatgtccaggcttgcatagactgcactttaaccagctgaggcattttctgggccgtgtttgcattgttattgctgttttaagacatctcaccataaagcccatgcctttcccttctgagtgctggcgtcaaaaaacaagccacgacgccaggccatgtctagactggggggcgtggggggaggcacactctttgcagctcagtcctgtcccttcacgcatcgcccctgcgtctcagcacttgagtttgcattcccagagtacagagagggaaaggacaaatactggggctgcgtagggagtttgttttcccgcacattccaaaggcgcagcggcaccgctcaaagttatacggccgcaaactgcgccaagctacggtacactgcgttacacctgccccagaaagccatcactgcaaggcaatgctcagcaacatccatccgctacaaaggccacttgcgagggctcagggcagtctacgccatcacgcccactcgaacccagtccccgcgtcggtcccgcgctaggctagtccgctcggcagcactcgggtccgactcggatttctccgggagccgcctgaagcagcatccaccgtgagcgctcgggacgctcccgcggtctcccgctgccctgcgcggcgtagcgcgctctacccacggaagtccacactcaccgaagacctcgcgtgagtagcgctcggcgaacacaccgtggctcagctctttcaggcccacgtggactttgagttggagcggggctgcgtctgcgaacgggcagctccgcttgggcatggtagcgggtaccagacacagccttcagcagcgcgcagcgcgccgcgcgccgagcacacgtcacggcgccctcggaccgcggcggaggcccgagccgacgagggcgcggcgcccaataggccggagaaaggctgggggctcgcctcaaacgggccccgctgcgcgggataggccggagtgacgtcgggggcgggacttacgcagttaacggcgagggataggctgagggaggcagtggctggaatgcagggcgcgggaaaaggccaagggcgctggcgcggcgaggtgaggtctgcgcaaggcgtggcacgggataggccgaggggggggggggttgtgttggggcggggctagtttatgtcacagctcaggataggccgggaactaagaggcggggctctggggtggggcgcgggattagcgggatgctacgttgggggcgggactcgtgtgctaaggggctctgcataaaccagcacgagatcgagggcggggctcagcgcgcgaaaagccagaaggctctgttgtcgctaagcaacggtgataggtgataggtgagatatcagtatcaaacagtagggtggcgggttttgtcccagctcctgatcttagtggatacgggcacccatcttcccctacgagttcctcttgtgttcccttaggtctgatcttgggcagggagcctgagggtttatggcgtcacctgcgggtccgctggtcaggatttaaaaatattgtggtgtcttctaacatgttgaacaggcaaaacagtgatgctgaggggtttctcagtccttctatttctacacaatcggaacgtcagttattcgggtgcattaagttttgtgctcatcttggagtacaggagacccggagtgtacacacagcacccgttaattctccagactttgtagaatggaagtctctgatcaaagtgtcaggttctctgcaggcttctgtcttccagaatctacaaataaaaacttttgtgtccttactggatgtgtgtgtgtgtcctcatctcataataacacccagtactttgaattaagttctgccctaaggaccctgttttaactctttaagactatatccaccagccc

SEQ ID NO: 1557 - DNA, 2424 bp, Mus musculus
ccgggaccagcggagcggaccgagcagcgtcctgtggccggcaccgcggcggcccagaacgctgcggccaggccggctgggctcagcctaccgagaagagactctgagcatcatccctgggttacccctgtctctgggggccacggataccatgaacgacgtagccattgtgaaggagggctggctgcacaaacgaggggaatatattaaaacctggcggccacgctacttcctcctcaagaacgatggcacctttattggctacaaggaacggcctcaggatgtggatcagcgagagtccccactcaacaacttctcagtggcacaatgccagctgatgaagacagagcggccaaggcccaacacctttatcatccgctgcctgcagtggaccacagtcattgagcgcaccttccatgtggaaacgcctgaggagcgggaagaatgggccaccgccattcagactgtggcagatggactcaagaggcaggaagaagagacgatggacttccgatcaggctcacccagtgacaactcaggggctgaagagatggaggtgtccctggccaagcccaagcaccgtgtgaccatgaacgagtttgagtacctgaagctactgggcaagggcacctttgggaaggtgattctggtgaaagagaaggccacaggccgctactatgccatgaagatcctcaagaaggaggtcatcgtcgccaaggatgaggttgcccacacgcttactgagaaccgtgtcctgcagaactctaggcatcccttccttacggccctcaagtactcattccagacccacgaccgcctctgctttgtcatggagtatgccaacgggggcgagctcttcttccacctgtctcgagagcgtgtgttctccgaggaccgggcccgcttctatggtgcggagattgtgtctgccctggactacttgcactccgagaagaacgtggtgtaccgggacctgaagctggagaacctcatgctggacaaggacgggcacatcaagataacggacttcgggctgtgcaaggaggggatcaaggacggtgccactatgaagacattctgcggaacgccggagtacctggcccctgaggtgctggaggacaacgactacggccgtgcagtggactggtgggggctgggcgtggtcatgtacgagatgatgtgtggccgcctgcccttctacaaccaggaccacgagaagctgttcgagctgatcctcatggaggagatccgcttcccgcgcacactcggccctgaggccaagtccctgctctccgggctgctcaagaaggaccctacacagaggctcggtgggggctccgaggatgccaaggagatcatgcagcaccggttctttgccaacatcgtgtggcaggatgtgtatgagaagaagctgagcccacctttcaagccccaggtcacctctgagactgacaccaggtatttcgatgaggagttcacagctcagatgatcaccatcacgccgcctgatcaagatgacagcatggagtgtgtggacagtgagcggaggccgcacttcccccagttctcctactcagccagtggcacagcctgaggcctggggcagcggctggcagctccacgctcctctgcattgccgagtccagaagccccgcatggatcatctgaacctgatgttttgtttctcggatgcgctggggaggaaccttgccagcctccaggaccaggggaggatgtttctactgtgggcagcagcctacctcccagccaggtcaggaggaaaactatcctggggtttttcttaatttatttcatccagtttgagaccacacatgtggcctcagtgcccagaacaattagattcatgtagaaaactattaaggactgacgcgaccatgtgcaatgtgggctcatgggtctgggtgggtcccgtcactgcccccattggcctgtccaccctggccgccacctgtctctagggtccagggccaaagtccagcaagaaggcaccagaagcacctcccctgtggtatgctaactggccctctccctctgggcggggagaggtcacagctgcttcagccctagggctggatgggatggccagggctcaagtgaggttgacagaggaacaagaatccagtttgttgctgtgtcccatgctgttcagagacatttaggggattttaatcttggtgacaggagagcccctgccctcccgctcctgcgtggtggctcttagcgggtaccctgggagcgcctgcctcacgtgagcccttctcctagcacttgtccttttagatgctttccctctcccgctgtccgtcaccctggcctgtcccctcccggccagacgctggccattgctgcaccatgtcgttttttacaacattcagcttcagcatttttactattataataaga

SEQ ID NO: 1558 - protein, 478 aa, Mus musculus
MNDVAIVKEGWLHKRGEYIKTWRPRYFLLKNDGTFIGYKERPQDVDQRESPLNNFSVAQCQLMKTERPRPNTFIIRCLQWTTVIERTFHVETPEEREEWATAIQTVADGLKRQEEETMDFRSGSPSDNSGAEEMEVSLAKPKHRVTMNEFEYLKLLGKGTFGKVILVKEKATGRYYAMKILKKEVIVAKDEVAHTLTENRVLQNSRHPFLTALKYSFQTHDRLCFVMEYANGGELFFHLSRERVFSEDRARFYGAEIVSALDYLHSEKNVVYRDLKLENLMLDKDGHIKITDFGLCKEGIKDGATMKTFCGTPEYLAPEVLEDNDYGRAVDWWGLGVVMYEMMCGRLPFYNQDHEKLFELILMEEIRFPRTLGPEAKSLLSGLLKKDPTQRLGGGSEDAKEIMQHRFFANIVWQDVYEKKLSPPFKPQVTSETDTRYFDEEFTAQMITITPPDQDDSMECVDSRPHFPQFSYSASGTA

SEQ ID NO: 1559 - DNA, 46422 bp, Homo sapiens
tgggcccaactgggaacatgagagggcctccctgcaggacagggcactggtccaaactcagcaggaggcacggtgggtgtgggagggggtaggggaggagccagcaccacctcccagaaggaaggacctgcatttggggtcaggactgggaaggcggcaggagctgacccaagaggggcaggcccttgcacaccagctcagcctgactttgaggactgtctggccagcaccatccccaccctgtcctgggcctggggcttaccctggctcttcgcaagtcaagagggcactgtgttgacgcttacagcacatgtagaggccctgccccatttggtctggaaaggaaggccgtgctcccgccagggagggctcagggctaatgaccccctgcaaggcctctggagggagcagggcagaggaggaggcgtggaattgcccaccccagcctcatcaacccagagcccagcccagcctgcacagggctctagaaatttctgtgccttctcccaccaacaagaggccaagggcgtagggtagtggggagggccatggcatccccaggttcacaggtttcctccagggtccagcctccttccccagggcaagaaacccccgtggactgccctgcccaagctggcctgtgtgctccgcctccctgacagatctgcctccctggactcccctcccccaaacgctggcagttggggacaaacctggggaaagagggggtgccacctcagccctgtcccagcctcccccatccaccagcatgagcacgtggtggcatctgggacacctgttcccacccgtcctcaggaatagtcactgccgtttccactggaggtgggctttattactgtcgccatgatgtgaaaagaggaagacagcacccattcccacgcctcctagacactgtgcaccaacaactgtctgctggggttagcacggagctgtccccacccccagggtcagagcacccacaggtgccgagctggcccaggagacccccacgctgctgacgctgtttgccttgtgtctgcacaggcctctactaaactctcccacacaattagtgtcttaaatatatgtacacgtatatattttgtcccaactgtgtcagttataaaatgaaaactgaccacttctccttacgttatcttcacagtagctgtgcagaagacaacaaatccagtgttgatagctcagggcaggctgcccaccccagcaaagggaagttcttcccccatgggacccactgggggacccagtgccgcggccacatctccgtgcttgggtggcagtgtagctgcccatctacggggtgccgggttggcttgggccttgccatgtgccagacgcatgcatacatacacacacacacacacacacacacacacaccccacccgattatggagcacatcacaccgatcccttgcagaggtgggggctggggcccaggacaatcagaagcagggcccctcccccagctgtctcgagaccaaagccatccagggcctctgagccctggggcatcacccagaagcgctgggctcccaggctggcacccagcacaccaggagcccagggcgcgtgggagatgcgctagggacggtctttcactccagaccaggctgactaataaatatgacatccagtgttgtcaggagatgagaaaataacgtagacttggctggactctgttgtcaaggccattcccagtcacagaggaaacatcccaggtggtctccaggcgtccaggtggctctgcacctgccgacccccagaggccagtgaggttctggcagcaagatgtgctccattaggcaggcaaagcagggcgacctgaaccaacgacatgtgtgggggttgtggtctccacattctattcatgttcgaggagcgtcagtctcccaaggctgcggatggaggcccctagggtgctgcgactcccactcctcacctgcccctaaccctgccgccatggccactttcacccatgcctcgccgtggggaaaggaaggcccgcaaaccctgcccctggcggacagggcagcccttgcctctgctcagtcagtgcacggaaatgcccacagctccagggagaccccctagcaggcagagtgaccgtcaaggtaaggcccacggtggcccagcagcagcacacagctcagcggcccagaccccaccctgggggatgcccagaggcttcctagacctgcactcaggcagacaagcatgtggctgggcggccaccagcagacatctggccgcctcaggaggctcttcctggctctaaagagaatccagttccaaattcccactttctctgctcaaagttacagtgtggtcataattgcacgctctcatggacccacgtcccacccgagtgacaatgatgccacagccactcagcttctagctggctctactcctgctgccttaggatccctgctggggctgcaccccccccccccaccccgagacaccagctgtgcccagatggcccctgctggcactcactgtgccccaggccttcctggcaggggttcctgctgccgctccccaggagtgtcctgttccctcccagcgccccattgggacgcacaccaacaacttttctgacatgtgaataattcacctagcgtggggccaggctcatgaagacctccccaagcctgccagagaggtggtcaggaaagtcccgggccgggagatggatgtgccatctcacacggagaaacgggggcagagccaggtgctggttggacacccctcagaacttggctggaggggacgggagaggaagatagtgtcacagcctaggcagggcacagcctgggggccggaatgagttggagagtgaggggaaaggagaggcaaggtgggaggaaggctgcccaagttaccgagtctgaggccaagttccaggaagaggcagcattctctctgccaggagggtggagccatctggcccaagcagggacctccacctggtcaggcttcacaccccatgctgtgtcccacctgggagggcccatcccttcccttccaccccaccctcaggacccacagggatgcatcacaccagaagggacttgacgaggccacagtgaaacttgcggacgtggcggtagaggtccccggactgcgtgaaacggcgctcacaccaccggcaggcatgcggcttctctcgagtgtgcactacggtgtgccggctcaggttgtgggagtactgaaaacttttgccacactgcacacacgtatagggcttctcacccgagtgtgtccgctcgtgcctcttcagtgtgtatgtgcacgagaaggtcttcccacagagcgggcaggtgggtgccacgccgtcgggtgagagccgggcccgggtgctgtctcgctcacggaagtgggcactgaggtgcagctgcagcacgtgggagctgggaaacagcttgctgcacaacgggcagatgcagaggggcccaccaggccccagctcgtcctcactcgccagtcgccctgcaccaagctccagctcccggctgccctctccgctgaggggcagcggctgcaagcccaccaccaggcccttggctgcaggaacaggaggtggcttcgggggactgtgggggctcctagagctgctgctctcctcctgttcggacagtgagtcccgttcgtccttcaccagtggctgggcccctggctgcctctggctgcagaggggtgtctggaggacgcacggtgggtggacccgctcctgccttgggccagacttcaacgacaggtccagggcctggtctgactcttctgggacctggcagggaggaggcccagatgctcgaggagggagggcagccttgaccccaaacggggggagcttggcctttcgggcagctgggcagaggtccgcggtccagacaggccaggggcacggtggctgagcaggttctgccccaggggcagggttccccgggtccagacttcgatccttctcctggagcctgcccttgcagaccttgacgatgtcatacatgtgcaggtagctggcggctgccaggacgtcctccacaggcaggctgcgcaggtccaggcggccctcgtacatgaagtccagtaggcggccgaaggcgggcgccgtgacgatgtcgccgttgagccgcaccgtgtcgcgactgcccgcgggccggtccctgtagaagagatggaagtagacgctgcacgcggccagcacggcacggtgggccgggaagcgcgcgtcgcccaccagcacggtgcagtcgcataggaagcccagctcgcgctgctgtctcaggcggcccagcagccgtccgccgtgctcagggaactccatgccgccgccgtcatcacctgggcacaaacgggacgcccgtcagcgcgcctggaggcgcccacgaagcgcccttcccggctgcaggcagcgcggaaagagcggcgcgggagtgacgcgcgcaacctcccgtccagagccgccgcgggcacctgccccgagcaggaaaaactcgatcgaaagtaaacagtagcagctccgccgcgggggcgggtcccgggactcaggcgcaggagccggagccgcgcaaacctgcgcgcgtccccgcccgggcgctcctgaacttcactcccgggcggccgcccgctcgcggcgtccccgacgcccgggtggctgcgccgccacccgccccacgcctccgcgccgcctccagctgccgcccggcccaccagatgccgccgccgccggccccatttatggcagcgcggccgcggggagcggggagagggccggcgggcgggcggggcgggcagagccgggagcccacccccagcgctcacctccgccgccccgagctcctctccggtcgccgctcgcgcgcgcgccctccccagggcggccctggcgcgcgtggagctgcgggcagcgcgccccggcggggagggcgcggggacggcgagggcgccgggcggggcgcgctccaacttggctggcccagcgccgcccgccgctcgccccgccccagagagagcgaaactcggggcgggggccggagggggcgggccgagcgacttcccggagcggcggaaccgctgaggtcaccctcgcccccccttccctgtccgccccacccggccgggccccgcgcgcagccagcaggggcgctggggtgtgaggggggtttagggcactgcgcgggggcagggggtctctcgcgatacttggcgctttggcctgggtcccccacctcccaacctttcccggcatggggtccttactgcgccagtctgcaaaaggaacccttccgagggtccgcttgtatcccagcccgcgttgggcagtcacccgagggtaaacccgggaccctggcctcccgccacctcgcagggcgccggccttgggatggcgtaggggttgcgtggattgggggtcgttaattttgcaaagatgacacctccttcttccttgaaagcctctttttgaatttaattcagctgggaccctcttccaaacattcaagcaggatgtcgatcctagagtccagaacggggacttccaccctctccacagaccccagcccagcgtctatgggggacccagcgcagagaggcacggaaaacgggcacctcccagcagacatggtggcacggggggacaaacgccataacagagacagtcggaagccctccagagcccagggtaggcaggaacgtgttcaaagaggaggagactccggacaggggctggcatgggagtgggggtagggaggagtgggggaaagtgttctagggcaaagaagcattgagaagatgtgagggggacgcctggttgtgggagagggaatcgccagagaagtagagagtgtgtttggcggggttagggtccctcccaggcagatggagccttttcccaggggcacaacctgggctgcccttgactgagcaggtttgaaggtactctagaccaccggatcatcttcacaacagtcccattaactagacgctcttattttcatacctttttggtgagagagtttaggtaaggtacccagagccatgtatcaggcagtaagtcactgaaccacgatttgaattcagccggtctcattcttctctgccttggagtccgggaaatggagaatgtagtggaggagtcaccccagtcaaggccaagcagtggggtgggggtggtgctggaagaggggctggatcacaaaggacaggacccggccaggtatgtgtgtgcaggaggagtggagcccacagtgggatctgaagtctgggaaggaaggcctcgttgttatactaaaatatcattccttgtttcaccggatggactgcatctttatttcctaaacctggcaactgcagcttggacccctggaatgacactgcacttacagccactgagactagcttagggacggcagaggcctggctcccactgccgccggccatccaccctaaggaccccttcctgaggaaggtcaactcccctctctccacgcatttaaataatcatctgccttgccccagccaccagcaggaatagctgaattcaagtaagttaagggtgaactcagatgtgactgctcccttcctgccctgcctggatcacagccctgccccggcccctcccaaccttgagcacgaccaaacctttaacctctttgaacctcagtaatcctcatctgcaaaatgggagtcagagtgcatcccggggtcttcgtgaacattaacgacagggcctggcactcagcaagctctcaggctctggaatgttcttccccaaagaacccttcactggtttctcttcatccctgtctctgctgaaagtccactccttagtcagggtggccattcctgcccaccttcgctaagttccctcgcagtcccttctgctgcataccctcctctccagcccattccgggtgtcctgtgattgtgggatattccagcaccttctgaaagggaaggggctgtttggtcacttggtgcttaaaagttggcaggacgcaagtgggtgttcagtaaatgtttgttgagtgaatgcgtgacggttgcttctgtgagtgattacgatggtcccaccatccctaatcctgactcctctgtggcaacattccagccctgcctgcccacacccccagcccctgaaccttcagagcaagtaggggtggcctgccacactggggctctgggcaacaggctgacagctccccactgcaggctgggagcaagcaccctagcctgccctgcctggctggcgggacagagagagcctggacacttaatgggggttgtggtacacagggagggtcaggatgctgccttcaggagcctagggtaggacctggaaggagggcccagctaggaatgggctagatgaaggggaggggacagtgggagagaagctccttatccctctcaggtcgggatgtctgggttcaagtccctcctgccccacaccgatcagggaaggggggctgttccaggcagagaccgcccagagttggtgctgggatcctggccagcctgtagtcctcagagcccctgtgactggctgggtctcaagtgcaggaatgacaggacaccgtcacacagccactgtcgcggcggtggtggttcaggcagaacctctgcagactcaggcggccatctggcctgggagctgccctgaggccccgccctgcagctgctgctgggacctacacagcccagggccctcgagtcctgcccccggccagcagctgcagaaggtgacagggcaggaggcccctgagctctgggaggaggcagccgtcgggcccttccctggtgcagcagtttttgtcggaaacatctggccacagagcacctcagcagtcccagcagcagccgtggggctgggttctctcctgaccattctgtctggggtgggagggggtgttcttgaagagaggactctgctttccctctgggacgctggaggagagggagatggccctgcccactgggagatccccgtcttgggggagggcagttcatgccaaggtgaagacaggactggagtgtggggcccacagtgggttgcaggcaccagcagatgccagggcaccaggctgggaagactgggaggcctccttggagacagccagtgcaaaataagcaagaggtccaaccacttcaagaacagcccgcaatgtcactgcctcttccatgagagggtgccctgctccctcccacatccccaagcctcggccacttgctggccttgtctcatggccctctcaccctctgcttcctccctgaattccttcctccatccttgcatggcagagcccaggatggtggacagataccaggaactcttcctcggggagcagtgggcaggtgggacagtcccagagggagccccaggtggctcatggtgcaggtttgctgggtgagagacagacaccagacgcccaggctctgggggcaacccttgtgtcaggtatcccacccaagcggcgcagaccactgggcctctgacttggccccctggaggtagggcccttcctggggttacaaagtctgagctgggagggagcagaggtgctcaggcgagaggcaggaatggggagtcccctgtctgaggagcgagtgccctcatgcagggggagagagtccttctcttggtcagccccaagaggcagggatgaagcccgagttttggctgcagactctgtcctgagcactgggccgaacctgctgcctctgtctgcatctcctcccaccccctcccctgctgccagctgaactcactctggctgaaaataaaaatgctcccccaaccccaatacttagcagcctcaggaaggtaactcacaagagtctgtctttcacaaaagggttattatcaactgtgggcctctggaatgggggaggggcagttgtcggaggaacttctggctaggaaggggtcggggtggcagtcacctgcactctcctgtgagtgtccaggagaaaggggtctgtgtcccacttactcattccatacccgggccatctgcctcccagtggacttcggactgggtgtccgggctgaccaagtccacccagcagggagggctctgggctgtcagctgtcacagcccaccctagacaccgctcctcctctgtctggtgtctgctcccagctcaaggtgggagccaggcaaggtgtgcccctcttctcccactccccagcaaagtcccccttttgtgagtgtagctgccagtacctaggtgaatggttgactcccctcggagccttcctgctccttggaggcccacctccaactgacctcctgtcctggcatcctcccgcacttcccccagaggcacaaggtcttgggattgggccttttaggtcactcttggccgccccctccacgccccccagagtggggcagcctgaaagtcaacctaagccacccccgccccgcgcgcggaggcagaagtccgggattcgtccctgacctgtctcgggccccttctgctagggtcacggcagagcgagcccagaagcgccgggtcactttacagacggggaaactgaggccagagagggcgtggccccgggacgggctggctggtggccgggctccgttagcggcccagcccaggccccaggtcgtcgggagctgcccctcagcccggccgcgcgctccccgagcgcgctccgccctcgccgccggccgcgcggtggggacgccccgggcggcggaggcggatgtgggcgggcggctccgggcgcggggcgggcgcggggcggggagagggcgggccggcggcggcggcaggaccgagcgcggcaggcggctggcccagcgcaggcagcgcggcccgaagacgggagcaggcggccgagcaccgagcgctgggcaccgggcaccgagcggcggcggcacgcgaggcccggccccgagcagcgcccccgcccgccgcggcctccagcccggccccgcccagcgccggcccgcggggatgcggagcggcgggcgccggaggccgcggcccggctaggcccgcgctcgcgcccggacgcggcggcccggtgagtccccgcccgccgtggccgcccgggcctggatttcctccccgcgggccgggccgctttgttcgcggccggtcgggccggggcgcgagccgcggcgccgccagaatggaggagcgggagcaggaagtggccgagcgggcctgggcggggagggcgcggggcgcgcgggcccggccaagggagggcggccccacgccgggcgccgggggtgcaggctgccggccccagcctccctcatgaccttggggaggccgctccgccgggcgaggccgggacccgagagaagggacgccgccgggcctggagctggggctcggggtgcccctgcgggccgtggggctccccgggcgctgggccagcgaggcagccggcggaggtgccccggggttggagaaagactcgccgcggccggccttcaagtttgtgggagggccccggaaggagacttcgtttcccacggacgaaaagttgtacgtggtggcggggtacccaggctagccacaaaggactgtgaccctcctgggccccggaactgcttcctgtcttgggtgggccctggaggtcctgcccgcccatcccagaggccaaggcttggagggcagctggggcttgccccttagattgagtatcctggggcgctagcgagcttggtcctgtcgggacggcctctgagtgctgccttggtcagcgggtgagcttgggcccctgctctgcagccagaggccgccccacattcactcctgggtctctcggccttgctccaggtggccacttcttgactgctttgagtccctcatccgagcgaagggcggacggagtccgttggtgggggtccggttgcctctcccgggagctgtgtagacttctcatacaccagggttctggaggcagatggaggagccctttcgaaacacagagtatttttttttaagttgtgacttaataatagtagcaagaatatgtgcttatggtaaaggcaggcggcaggtacggaggctgtgggaagtcggggtccctccgcccccacaggcagccctgtgctggcctggtgtatacgtttctgtgcagacgtacaccaccctgtgtgagcacagatgtatttttacacatggctctggacagctgtctgactctgtcagcagcaggccttggaggggctcaggcccgtgtgggggtggggggacatccagaggtctttgagtccagccctctgcctccaggccacgcccactcagtgtcgtcagagccccctgtgcctgaggcgtgcgcggctcggagccctgccctcggagtcctgcggtgccttcctcgagtctggcctgctttccatcctgctaagtacttggggcatttccctctttgggtaaggtgtggtcttccctgtcctggcattagacacaaggcagtgggccttcctgccattctaagtgtagcttaagacaatcagtgcaaagcaaccctttgtgggtgtccagcccttgcctcgggaggccagaaaggtggcctggggggagagcgtctaagctggctgtggaaagacccatgttgggatccattccacagaggtcgtcaggggtctctgcctggcctggaggtcccagagaggaccctcctcccctcaggaaggcccatctggaagggtagcagaggactgctcacaggaagagcatgcgaagtgctctttctggggatgcctgtagttggtgatgtgggaactgggttttgagggatgcctaggagttcatccatcagaggggaaatgaggaagccatgcaggatcaatggataaagtgtgctcaggtgagggttggctggtgggccgctgcagggcgggggcctgtccagtgctcccccacttacttgctgcctcccgactgctgtaattatgggtctgtaaccaccctggactgggtgctcctcactgacggacttgtctgaacctctctttgtctccagcgcccagcactgggcctggcaaaacctgagacgcccggtacatgttggccaaatgaatgaaccagattcagaccggcaggggcgctgtggtttaggaggggcctggggtttctcccaggaggtttttgggcttgcgctggagggctctggactcccgtttgcgccagtggcctgcatcctggtcctgtcttcctcatgtttgaatttctttgctttcctagtctggggagcagggaggagccctgtgccctgtcccaggatccatgggtaggaacaccatggacagggagagcaaacggggccatctgtcaccaggggcttagggaaggccgagccagcctgggtcaaagaagtcaaaggggctgcctggaggaggcagcctgtcagctggtgcatcaggttagggaggctgggaaggccttttggggatgggggtgatttgtccaacggctgggggaggtgggaatggggaggtgagcaaggcagcagctctcagggcctggctgttgcgggtggtggtggcaggggctggaggctctaagcctagaataaggagaggcccaggtccagggaactgtgttcaattacatggatttgacacttggcagccctgagtgttttggggagagggaaggcaggcgggcagatgggggtcagagagcttagagggatggcagcccacctgggaaggcaggtgcgggtggagcccccaggcacgtgcagtgggtctctggctcacccagggcgaggagctgcccttagccaggcgtggcctcacattcagcttcctttgcttctcccagaggctgtggccaggccagctgggctcggggagcgccagcctgagaggagcgcgtgagcgtcgcgggagcctcgggcaccatgagcgacgtggctattgtgaaggagggttggctgcacaaacgaggttagtacccgctgccagggctgggcctggggagggagagacaggggtagtagccccagggtctgtgagtgcctgtgccctgctgggtgggaggggctgcctcccctggggctcctgggctggcctagggtgagtgtcctgggccccatgtcttcccatggcatggagggcacggcctcggggaggccaggaggatgaggccctgtgcagggccggccatctgagtggcttcctggtgtgggccctggcaggcgggggagctgctgccagcctctctcctggctttcctggaaggcagcgaggacactgggctgttccagggtctggcacgctggcggcccagggcactgcccaagggctcctgagggcagggcagggctgcttggcttggcctggtgcctgcttcaggcctgagctttgggggtggggggaatccgtaccgcctgggcacagggcatgtttgccttggagctgcagagctggctgagccaagtcccccagcccctgtgtccccctcctcactcatttggccttgcagcctatggaggaggtgctgcccgaggggcctggccagcagctgggtgggatgggagctggggacatagccccaccccttccaaccctgtgcaggcccttctgcctcacccaccctccgttgctcagcggggtgcggtggagtctgggtggctgttttgctcctctgtcctgctagggtgggcttcctgttcaggtccaggtcctctggccaagtcactctcttctgccccaggcggaatcggtccgccctctcctgacttctttttccagacttgttccctcctaagttctagtgatctcatgccagcagccccccggctttacgtacaccctctagcagatgggtttcacatctggtagtggggagaccccaaacacagctggagcagacagggaggtgtggcaaaagtaggtgtcacaagatggggcattgtgggatgtataggagctcacagaagagcaggcctaaggagccacaggagcctgggggtggggtgaaggagtgaccgagatgagatgctgggggaatcaggggtgtggctggctgtgtgtttggagtgtttgagtgggcagctaccagtgatggcacgcggggcctcgagatgaagacaaggaggctgcagacgcctgtggtccttggggagcttctggctctgcttccccccaaggcctcctgccccatcctgccttctccatcccctccccgtgtgctgtcccctgcttgttccccaggagtcctgccacctgtgcctggaggtcctctcctcacctcacagccctctttggtgtcagggaccccctgccccgaccctggccctgttcctctctgtgtcacatagtctgctgcctggggccgctgcttctttatccttggcaaatgtgtgtttgttgatagactgttggatctcgggctgacccaggagatgccagggccttgactgcccaggggcccaggccccagttactggggcacccatcagccagctgggcctaggcaggagtgctcccccgaggccaggtgattttcaggctgctgctgatgtcgtgccttcaggaggggcctggcagggacaggacatcaggcccagtggggcgtccagagagctgagtttgaaccctggttagccactctatcgccatgaccctttccaagagcaaggtcattgagctccttgggcctcagtttccccatctacaccagggagcggtggtgggagagagacctggtggagtggagaatggcttgtgggcggccctgagttggggtccggccagcctcagcagcctctgggctctgtcatctggcccctagcctcaggccaggagagagggtcctgtacctctacccccggctcttcctcctccatccccagtgtagtgggcgctgaggatgggaggtggcgtggatatgacatatgcccttggcaggcatagcccctcttgttgccgagagcaggtggcgtccacccgcatggccggccgctgcttgcggaggaaagcctgtcctccggggcctgccgcatttcgccactcccgtccctggggtcccctgtgtgtcttgcagatgtgctgtgccaccctcctggcagggccagccccacccgcaacactggttagaggtactagctgccttcctgtccctagcagggctgtgctgggctgaccccacccgtgcttcacagtgctcaggcctggctgggggtggggagggagggagggacgcagtgactgtcctccaggcccggccgcagccccttgcagacgccctgttccactcccccccagccttgctcctgcaggtcagggtgcttgtctcggaggctggcccgcacctgtcccctttgccgggactccccacgaccgtggcctggggcactttggttctcagctgaatccccaggtgacagtcccaccacggctacttgggctggccacacgtggcgtgatggtgccttcaggggtgatgtggtcattgagatgagaggggacgggtatgccctgtgtgtgaggggtggggtggcagtgtctgcaggctccttctcctgctccttgggaggtgagcgtcatctctgggaagtggcccaggctgctttctgttgttctgatgtgtgtgctctgagtcagaggagcttcagggacagaagggaccgggcatggggacacaggagttccggctgcaggcctgtgtggacctgtggctggacccaggcgaggcctctgggtctgcacatctaacagggagatggttcctggagggtgagcttaggctgttaagggcaggagctagtgaggaggctggtggggcctatagggacagggggccagatgtcccctcctgtttcggctgtctcactggataagcagcccagctcagctctggccattggtggtctggtgggctcagtgttgctcagacgtttgcattttcaaagatttgttctgttgtgtgaagtctcctgatttttgaaggctgacaattttaaaaaatcaatcctgggccagggcgcaggtctggctgaactcggcctccagcctgcagttttccttcctttgatagctccgtgccaggctttggccagaggccgtgtggctcttttgaggtactttccccaaacagcttgctcaccttgcccgcttgccccagtactcctggggccgtgcaccagcctggctgcagcctagccccgtggagagctgccctggtgcagccccggcctggagcctgtttttgtccactcgcggctgtcttcctgagcgtccccccgtccacatggctggaccaagtgggtcaggagagggccgaggcgggtggccgggatgctgggacccaggatgaggtgctctgggctctcgagaaagggctgggcctaggccaggagtgggtgccggccgcaggggcaccacctggactccctcaggctggtcgctgtccgagaggggccggggaagagctgcaggcctggctgccttcggcaggctgtgacccagcaggccaaggccgagtgggcgggggtcgagggaagctgcctggggcgcgtgggttacgcggcagacgctcctgagtgtgtgggcagcgtgtccaagccacggatctgggtgcctggccgggcccgggtgacacgggaccgtgtgtccatgcggctcacggagggtccagtctccggacatctgagtccttgccatgccctaccccgggcccatgcctggcatagaccccccagtccaggcctcagggcagccccctcaccactcctgctgagttagccccaggcgtcccggtggggagtatggaggctggtctctgaccccaagcaggtgcctaggctgggcctccttcccaccccctctccccgccttgaagtcctggcactggctgtccctgcgggggggcactgaggcagggagagagtggttcctaccccagtgtgttacttcgctttggtgagcgacatagaacctcactgcatccccagctgctgctcagccatccagctggtcctggggtccctgcgtgaggtgggggacctcagagggtacaggccactccccttcatcctggaggaggccttggctttgctgagtaaacacccttgagaagaggtctgtgggggactctgagcccactccagagagcagctgctgcggagggccccgcagggctaattgtttgtgtgcagatggaggctgctcattaccccgccaggatgaggggcccagcaggaccctgagggagggagcccgcagactctcccctcagcctgtgggaacctttgggctccaggccagggctgcctgtgcctcctgggcctcagtttttcccaggctgtcaggtgagggtcaaccccaggctgcgtctaggtggcttcagtgtgagacccgcgggccctgggctggttagtgccaagctctgcctcccctgggggagcgttgagggtctggaacggcccccgtgggcaggccagggacagagatggggaggcaagtgtgctggctcctggtgggagggctgggcagagagtgggggtcccaacagccctgggcctacccgggagaggggcaggaggcacaggctggtggaggtcatggcatggctgtggtggaggccgccagcatcagggaggttcctgttttgggagcttgttgagttctcacttcaaaaacaacaaaagaggaagccgaggtggccttgagtgggggtgaggggtcactgctggccccagccctggaccttagcccccacgcctggtggctcctgagtggacagctcttcttcctgtgtgtttcttggtcactggccctctctgggcagggatgccctgtggggggctggactccgggaagggaaactgaggcccaggagagtggacagaatgtgggtggaatgattcctgtgctggggcctagacccccgtacaccttccactctcaggagaagcctggccgggttgcatcaggccgggttcctagaagtcctgcacgaggctgagcggagggaactggcgcggcccccgctggcgtcccctctgcctgggcacacccggcccggcttggggccagcaccctgccctcgggccctcccatagctgagactggtggctgtggctgtggctctgggcctgctccccaggccaccctgggtgggcagctgcctgctgcttctgtctgcttggaccattgtgcctagtcccatggcctcaggagaaggttcccccagcccagcgctggggccccgggcaggttggcagagggccctggggctccaggccaggatggggctgttaggcgaaccctaggccccttacttcctcatctccaacgggagttcccttccctgccatgccgcctttaggtgtgttttccttgaaccttaaggaatgataggtttggatttcagaaacgttggaattgagggggttgggagttcatgggtgactctgctgccaatgttgcgggctttggggtgggatccttggggcgctgtgtttgggctcacacaccccccaggcgggcccggtgactgcagaccccacccataccctgtaacctggcgggcccacctgcccaggccctcagctggttgtccagctcaggggtggagacaccccctgggcaggcctggcggggaggtggctgctccctgggcctggagaatgcagagaggcccttcggctggccagggtctggctggcctccccacagactggggccaggggcacagcagccaggtgtagggcgcggagacgctgagctgcacaagcttggtgaggtgtggggtgaggccacgggggtcagggccacaatgtcccagcaggccgggggatcagaaggagcaccctccacagctggccgtgctctgggggccctcctgccccaggcgtggctccaagtcggggcagaaacaagatggtggggagatggaaggcccctctgtggcgggtgcttcccatggtcggtgtggaggacgaggtccctactgcctggttccagttcccccagcaatgcagggcacttttcctggggtgtcagggattgagaggccagcactggagcccttcaaccgccaggggccctgcccaagagagacgggaggagggaggggctgtgggcatggctgcgtgcccccggccgagccccggaaggagcctgtgcccgtgcccacttcctttcccgagggcagtgtctacacgtgggacactgtggccagccctccctcgcagcaggcactgtgtgctgtccccatgcccagcttcctcccacgcagggagcgagggtgagggccctgggaacccactgggtggagggcacttggcaaagcctgctgcaagttatggggagagtgggcgggggcagagtaggaggcgccagggaggggctgcagcctcatctgcaggggtcctgagtaggcagggtgggccatgacatgggtggggcttgtttggggcagaccaaaaatgaggtgggggacagggacagggacagggtcttgggatgtgctgggctctgcgatggatgggtgtgtggcaggtggggtgcctttgccggcccgaggggtgggtgacgggcagtgcctgtgggggaggacatccaggcccaggtggtctgtcaggggcagcaccagggaggcccagtaccccacccagtagagccccaggagaatggaaagctgagacccaggtgcttccctggagtggcaggaagagaggccccagcgcctccggctgtgcctcagcgaggtggacggggtcatggtggtgccgcctgcccgcaccatgttcctcccggggtgtgtgtgtcgggctgaggcctgctccatggtggagcggaaggaggtgaagaatttgcagtttgtgtcaagttacaacccctgccttggcggcaggacctggggtctctctggtcatgatctgcctctgagggtcacctcccctaagtctccgttttcccagggagctgatgggcatgatgagccctgcccgccctgcctgcctggtgggctttctgggagagcagaatgggtcctgggctgggcgaggcccaggcaggtggagcgccagtcctctgcctggcgggaacagacacctctccttgtgcagactggccacttgtgccccctcagaagggcttgtgccgggaggagcagtggatgtatttcacccacagacctgggggctccagccaagtggggtcagctggcctccgttgtgtggcccctcccctgcccccaccccagcctggttgtttacagggttcgagggctgctggtaaaggggtgtgtactcccgggcccgggcagaggcctggcaggccgggcccttcgcggtgagctgtgcggtctcctggcaggcggggagggtgggttgcgggcccctcatgggctgccgtcagcggagccgtctgctcaatgtgctggagaaggtaaatgggcccccggcagctgtcggggcgatggatgtgtcggcagtggggaccacggtggccgctgtcagctggcgcccgctcccagggcctgctgggctcactttgctgtggagaagcagctcggtgccgcctggcaccctgccagccgctgccaccaccgtctctgcgaagtgtttatccagcagtttcctgagaactggggactttgagagaatgttcagggagctgaggacgtggtggcctaggggggctgacacacctggtggctcaggaggtggtcagtcccgggacgtggagggccaccagctggccctcaggggcccacccagtcctgcccatggcgcgtgggtcctggcccccatgtctaagtgggtgccgctttggggggcctgatccacagtgtggcctgggacacgtgtgtgaggcgtggagagggtgggctgcctgtgactgtccatgtggtccccgtggtggtggtggggtgggttgggggaggccaggcaggagcagcttcctctcagaaccccggtatttggtccaggaggacttctgggaaggaaccctctttccctgggggtgctccagccccttcctggggatgagcggggttggggatggaaggtcactcctgccggagggccacccgggacatcgggatgccagagggaccagggctggggttgtgtggggcccaggaggtgcaggaggagtcgagggagcctggtctccgctgtccccccgggcagggacaggagtctggccaactgcctaccccccaccgagggcagccacctcccatgcctggagccctgggccatggatgtgctggctggtggggagggttacgggtttcatcaggcacaggagcccctgcccttgtggcttcacaggacctggtcttggataggtgcagtgtcacagggttaagggtcagggtggctcccacctggcccagggctggccttgagagaaccctgaagggtgggaccggagctgctgcctcccactgcccagggggccagcaggagggtgagactggaactgctgcttccccgctgccgagggaaccggccatggggcaggagggtgggaccggagctgctgcttcccccttgcccaggggaccagccatggggcaggaaggtgggaccagtccccagtgccgtcctccactcggccccccactcaggtcttctggcagtggtgtggggtcccccatccggacttgctgacatttctgaaggggcacctagccgtcttccctgccagaccctgaggcccaggccggggttgcactgggaccctgcctgctccaggtcccgggtctgaaacatgtgcagcgggtggggacttgggggttcttgagcccagcatgggggtgtgagagttagggactgaagaggccccctgggcctgaatgctgggcggtctccattgcccttgggagtggctgctggcaggagatgactctggctgtgtgtggggtggggcgtgccctggcctccccatttgttgcctgcctgtacccgtctggagtgagggcctggcgtggcaacctgggggtctgtgcccactctgtgtttggtgccctcagctgtgcaggcaggtgggtggggtggtgttgggggggtgactggggtggggtggggggatgccagctggctgatggtggggagatggaaggcccctctgtggcgggtgcttcccatggtcggtgtggaggacgaggtccctactgcctggttccagttcccccagcaatgcagggcacttttcctggggtgtcagggattgagaggccactcttcaagtggactgtactcctgcctcgagtggggggcatctgaggaccacaacagggtggggaactcaagttaagtcctggatgacaggttccagttcccctggggaccctcaggatagtgaaggagaagactccatgtgggttggtctctttgtgtgaggggtctgggagggcagccctggctgatgtgtctgtgctcccaccctcctgagggacccggagtaggcaggtgcaggcctgcaggcgtcctgtggccatgaggacagtgatgctgggccccgggtggctgtctcctccacctgccccgtcctgtgtcaccccagtcctggatcagggagtagtggggccctgccgcatctgctgtcggggctggccgcccacccagcatcctgtctgggctgaactcgttaagatgcgcgccacggccctggctgcagctggcacccccccaagtgatcctctagctgaccctctaggcgagagatgaagaaagagaactgtgtgtctctggaccccttaccccgggtccctggggatcctgctcctcccctggaggggtctgtgtgctgggctgggatgccgaagacaaggccacgtgaggccccttcactcacacccgtctcctggggtaggccctgatcgccgtctgttccctgggtctgtggggccaggcgaggggaaggcactgaaagcccagggcccatttgggcctctgcccatcccaggactccccaggaatgctcggggctgggcacctgtcctctcccaccccccacgcctggtaagcgccgcccctgggcctgcccctcccgcacccccagatccagctcccagaaccccccagatgcagctcacagaacctggggctgggcttgtggcagcagggtcaggggcaaggctggggttgggcacgggagctgcgtgctcgggggcagcacggggccatgctgggcacggtgggggctggcagcagttggtggataagatgggtttcaggggtgccgggcctgggcgctcatcagtcttcccgctcagttagcgtcccggggagtggcagctggcaggatgggaggcactccatcaggggccgacagctccagactggcatgcaggcgggtgggcgtgagcagcggggtggcccaggatgggggacgggtggggtgggctgcatgcagccccctgagcctgctctgctctcactgagagcccctgcctgcccgctgcacctgcaggggccctgtggctgggggaggggacgtgggaggcggggtggagctgcgtggcacgtatgtgcgtgtatgtgcacactcgggggtgtgcgagatcccaggtcagggacaggagccggcacccaagggtggcaggaccacgcctgctcggcagcccactggcaggggcatggagggcttgcggagtgggtggggtctcctgatgagtgctcttgggcacaggggcagattctgggccctggatcatcctccctgcaactgggtgttggccgtcctccagaggtgtcaggcagctatgagtgggctgtggctgtccccttcctggtccaccccagacctgacaacagcctcttcccacactcaggccctgctgggtggggtgtccccaccctccaccagcatccccccagcagccctggcttgggcagagagagggctggtcttgtggagaccacgccccgtggtgctggtgggaagggcattgggcagctggggccggggtaggagggagaggtcacctggccggggggtggccatgtgtcgagccttggtggctcacctctattaaagaactcccccgtggctccctggaaagtagaatgcctgctgggatgcccatgacccatgtcctctgagctcccctggggctgctgccctgctgggacttccctgtgcaccagggagggctggacgcgtctgggctcaccacgaagacccagcaggactgggtggtgggtggtctggtgatgggacaattgcttgtcccccacatccctccaggtgtccctgtctggggctcagtgtggcatgaaaacccaggccccagagctcagggaccccaaccccttaccctggccccctccctaacccctgcccagtgacccctcagatgaagcagttgcctaattagtaagttccctgttgttcaaactccttgcttggcaaaatgtaagtggaacatttttttccgagtgtcagtatgaaaaatggtacttgctgggctatcaccgaggacagctgctctgattctgaagtgtgaacgcctgcgtacggctgatgctgcaaaacttgagggagaacgttcccgtgtacctgaatgacccacgggtgggacgcggcagggccgacggcggcagggcctgagtgtgggtctcagcctggggacttggcaccctctgtgccctggggcccctgcccagctggctgggccacctccgtgtctggcttcatcggcagtccccaagacggtgctccaggcccctagacagggagtgcgatcccacggcagtgggcagtcctgtcccgcgagcccggccctcagtctgagtggtgctgacctctaactgtggacgccatgctccatcctcctggtgggtggcggcggggcggggggggcggccatgctgggcagcccacacaagccactgtcacctgctgtcgccacctggccgaccctggttgattggggaatgctgtcagccccgcagcccctgtggccatagctggggcccgagctgctgctggtgcctgctggggactggctggtttagggctgcctcctccaggaaggctgtgcagactggcccagacctcttcccagcctcctgtccatggtactccatcccctgcgtccagctggcccagcccgttttcagacacagctcggggtggctcttctgagaggggcgctgtggtggggcgagtctgccttcccgttgacccagggccgtttctgtcgctggccctaagaaacagctcccgtaccgcgcctgccccctgggactcaggcatcccaggcacatctgtcctggcacacccagttcctgcctggctgcctggcgagggtctgacgggtagagtgtgcgtggctctcaccacccgcacgtctgtaggggagtacatcaagacctggcggccacgctacttcctcctcaagaatgatggcaccttcattggctacaaggagcggccgcaggatgtggaccaacgtgaggctcccctcaacaacttctctgtggcgcgtaagtatccccttggcctctcgggattcagatttggggggttggctggagccctctttgcccaccaggccccacgatgggggtcccctggagcctccatgtcctgggctggcaagcaacaagcactggctgggtgggggtctctgggccgagtcccgaggctggctgggcaggggtctccgggctgagtcccaaagctgaggctggctgggtgggagtctccaggctgagtcctaaggccgaggctggctgggcaggggtctctggtccaagtcccgaggccgaggctggctgggcaggggtctccgagctgagtcctgaggctggctgggcgggggtctctggtccgagtcccgaggccgaggctggctgggccggggtctctgggctgagtcccgaggccgaggccggctgggcaggggtttctgggcagagtcctgaggccgaggctggctgggcgggggtctctgggccgagtcccaaggctggctgaccctggagcagttccctggtgcccatgctctggaagctggagggtccggacaagtggcagcagagcccagtctcagggtggacagctgccccgggggcccctcctccaagggggttagatagagcccatcagggcctctccttgggaaaccccttgggtgagggggcaagagtccattggggtctccagctctgaagcctccatcactcgaggaagagctcgtgcctctccctgcacaggctctcagcctccagaccccatggcagagcctttgcttcccctctgtgaggctgcctccttgcccatggaggggcaggtgcagaaaggccagcgggggaccttggccggagcatcccacagagatgagagacatgtgacgctccctgctccgccctgctgtggctttattccttacctgtagcgggggcaggtgcgaccctacccatgtcagacgggaaccctggcatggagacccaggcgccctgctaggtgggaggctggggacacgtgggcctcccagcatggtccccattttctgtgtccctgtcctggagcccagctctgcctgtggcagccagagacacgggttgggcatgcaggtgtgactgagtggctaattagggcccagttgtgggccatctgtatgtggcagggctgggtaactgcaggcctctgggatccgtctcaggcaggtctgtggtgcagagcgaggtgcccaccaggggctggccttaggttccatccccatgtgctgcatcggcccctcccctccaagtagctctgccctcctttctttgaggcctgcggtcctccgactcccttgaacttgctggacccccaggttctggtccagggtctgggaggaggttaaatgcagggaatccgtccccaggctgggcagggaaggactcccacccttggtgcctgcacgtataaggggaggtggggtcagtctggcaccctggctgctaggtggtctgtggccagcaaaccgtgccctgaagcttctagttgggaggggcagaggccttgccctgcaaagccccaggctgaggggctggggttggggtggggtttaccaggacctggttcctgtaagccgaggtctccttccctggctcttccagcctcaagccagcagtagcagggcagcctgatagagtagggcaccccaggggtgaggggagaccaggaaggcagacacccctgtctcctgacagcctcgtaaccatgcaggagactcactgtgacttgtcccacaccctccccagtgtctcctcggttggggctgggggcttcagggatcagggagaggctgggtgccagcagcgtgcctggtggcacctgggacagggccttgctgggggtgggtgctgtgggtgtgctcgccaggccgaggcattgggaaggaacgaggtggggagctctctggagaggcacacgggtgggtaccagctggaggtgttgcctgagcagctggcaaggctggggccttcagattaggccataggtgagtggcctggagcgcctggccaaggagcagagctgggcaggggccaggggctgtgctgggcctctgtccggggcttttctccggggaacggttccggggcagtgggctcgagactctggccctggggattgcatactggggcagatcggaccatccaggagcgagtgggaggtgggtgtgccggggcttcacaccggtttccacttctctggcctgtgttgacacaggccaccctccccaccaggctggtcccgagccccctcctggcccccaggcctggaagacagcttccttgctgcctggccaggcccccttgtggttgccagggcctcgatgctggaatgtcagaggccccccactggcccctcagcctcctcctgctttgcacaggctgggccagagcctgccacggagccccagcggctacacactccactcactcacacctctcagggccccgcacgttcccacagccctcagggtgtacgtgctgtaggtgtggctgtgccccaggtatgtgttccccaggtgtgcttgtgccccaggtgtggctgtgccccaggtgtgcgtgtgccccaggtgttcgtgtgccccagatgtggctaggtgtctagatgtgttctagatgtctgtgtattccagtgtggctgtgtcccaggtgtgcgtgtgccccaggtgtgtgcctcaggtgtgcgtgtgccccaggtgtggctttgcctccagtgtgtgtgtgccccagatgtatgtgtgccccaggtgtggctgtgccccaggtgtgcctgtgccccaggtgtggctgtgccccaggtgtgcctgtgccccaggtgtgggtgtgccccaggtgtgggtgtgctccaggtggctgtatttcccaggtactcagggtgaggttgggaaaaaagcaggacatttctacactaggtgggacaagcaggtttctggggtgcccccctcatgccagcccctctgtgggatctccatacccctcatcctctgaggcctggcgcacggcggggctcagagactgaaggaaggactgtaggagtggacgatggtgggggtttgacctgacgccgggccagatgccctgtgtggctgcctcagcctggagtagagtgtctgagctggaacaggggtcctagccccactctgtgaggcgagaaactgaggcttggagagaggaagagatggggcttcccaggacctggtgggtggtatgcaaggggagctggctggtgcagcgggggctgtggtgagggccctgggaggggcagggggatgcacgcagacagaggctctgcctgcccgcagagtgccagctgatgaagacggagcggccccggcccaacaccttcatcatccgctgcctgcagtggaccactgtcatcgaacgcaccttccatgtggagactcctgaggagcggtacgtgggctgtggcggccaggccaggcacttgggcagccccagcgcttaggagggacacggggatggcggggtgctggcacctctgcctgtagccatcctcactccccagtgctcccaggccctcctcagagcccagtttggaaactggcccagtcctgcctgtggggtttgggtggggaaactgaggctggagataaaaactggctagggaccgggtgcagtggctcacgtctataatctcggcactttgggaggccgaggtgcgcagatcacttgagaccaggagtttgagactagcctgccaacatggtgaaacccccgtctctactaaaaatataaaacttagctgggtgtggtggtgcacacctgtaatcccggctacttgggaggctgaggcacaagaatcgcttgaacccgagaggcagaggctgcaggagccgagattttaccactgcactccagccagggcgatagagcaagactccgtctcaaaaaaagaaaaacccggtggagagggccagtcctccttggggggcggagtcctgcttgggaggcggagtcctgcttggggggggcggagtcctgctggggggcggagtcctgctgggggttggagtccggttgtggggacagagtcctgctggggggctaagcctgggtgtcccccacgtccaagagggcttcgtgaccctgagtgtatgtggccagaccaggtcaagtggtggcctcctcagggctgtctctgggaaccccgacagctgtggaaccacgcttgtgaggctggcgggtgggtgaaagacgtggggtggagctcctgatctggtacaggcctgcagcctcacctgacctcctgcagggaggagtggacaaccgccatccagactgtggctgacggcctcaagaagcaggaggaggaggagatggacttccggtcgggctcacccagtgacaactcaggggctgaagagatggaggtgtccctggccaagcccaagcaccgcgtggtgaggcctgtccccacttctgcctgtgcctggggctgccttggactgtggagggctgggtgggtcatggggtcccagctcggcccaggagacactcagcactccacggcatctccacctaggccggttttccatgtagggcgcagctgcttcccaggtgggtcctcttccccatgtcagaggaaaactggggttgctgagccctgccaggcttgggcaatgttaccccacccttccctgaaccccatgctctgagctggggccgcagccatgtgttccctgtaagcctggactccccgctgagcccagtaggccaccaggtgtgaagtggacgcctctcctggctctgcctccgactctggggcccctcatgccaccccacgcatgccgaccagctgggcactgttggcagcgccgcttgctgaccctggtgcctgcccatagaccatgaacgagtttgagtacctgaagctgctgggcaagggcactttcggcaaggtgatcctggtgaaggagaaggccacaggccgctactacgccatgaagatcctcaagaaggaagtcatcgtggccaaggtggggccggggcggtggggcagggtggagatgagggtgcggggtggcagctcacccagccctgctttacaggacgaggtggcccacacactcaccgagaaccgcgtcctgcagaactccaggcaccccttcctcacagtgagtgggagcccagatggggctgaagggctggggccaggtagcgactcctggggctgtctctaggggacgatgtcctgtcttcttgggcacgtgagggctttacacaccgtggactccgccgctggtgagacaggcctgccctggagggtcaggctgtggaggtgcccagtgtgggctaggggctgtgctcgctgctcccgtgtgcgggcaggtgggtggggcaggtggccctggtcttccttgcactctgccgaggctccaggaggccccagctccccatgccctgcagccctgcctgccaggcttttgttgaggcccgggctctgtcctgcagaacctgttctggggacttggcccaggaggtatttactgtgaagggggccaggctccagccacttggttagttccaggtcactgtgtttggggacgattctcctgcagatggggcctttgctttaaaagcacagtcgcctgtggtggaaggcgggagggtgggtctcgcctgggagggtgtgtcctccctttgcgaaggccctggtgctgggagcactgtcccctgctgaggtcccaactcaccctggaggacctgagcccaggccaccttgctcacctttcaaacactccttggcacctcaggggctgccggggcccagcctgatggtggcgtggcatgaggcagtgtggtgtggggcagtgtggtgtggggcagcgtggcatgggggcagtgtgatgtgggggtgtgtggtgtggggcagtgtgatggggtgtgtggtgtggggcagtgtggtatcgggcggtgtggtatcaggcagcgtggtgtcgggcagtgtggtgtggggctacgggcggtgtggtatcaggcgacgtggtatcaagcagcgtggtgtcgggcagcgtggtgcggggctgccgtcctgcctgtggggccgcagttccagctccccttccttgcaggccctgaagtactctttccagacccacgaccgcctctgctttgtcatggagtacgccaacgggggcgaggtaggggctggggctgcgggggatggacttcgcggcctgtgggccgcccatggtggggccggtccttcccggagcctcggctactctccatggcaccagacggtgctccctgctgggtgggtggtgtgatgcctgcccaggcagctgcctgctgtggggtgacttgttcctgctgagttagggcttctgagactttccaggcccccgtgccctctggtggctggtcccttccctgtgcaatgccgagacccggtctgagaaaccccagccctgcaggccatgggggcagaggcccgagccacggctgtgcctcaggttgcgcctcccgcagctgttcttccacctgtcccgggagcgtgtgttctccgaggaccgggcccgcttctatggcgctgagattgtgtcagccctggactacctgcactcggagaagaacgtggtgtaccgggacctcaaggtgcgctggcgggcaggcaggggggcagggccctgggggcctggcggcactgacctgaggccacctttcccctagctggagaacctcatgctggacaaggacgggcacattaagatcacagacttcgggctgtgcaaggaggggatcaaggacggtgccaccatgaagaccttttgcggcacacctgagtacctggcccccgaggtgtgcgccccacctgcgtgcatacgcgttgctgcgtccccacgtcctgagcacacgcaatgctgtgtcctctctgtgccccaagcacgtcacacctcccccggcagtgtcccggacaccccttgatgccgagtcctgcccatctgccacccgtgcaggtgctggaggacaatgactacggccgtgcagtggactggtgggggctgggcgtggtcatgtacgagatgatgtgcggtcgcctgcccttctacaaccaggaccatgagaagctttttgagctcatcctcatggaggagatccgcttcccgcgcacgcttggtcccgaggccaagtccttgctttcagggctgctcaagaaggaccccaagcagaggtgagggccgcccatcccagctacaggctacacctccatcccctcatccccaggctgcacctgcccctgcgccaggcggtcctggcacctcccagactacactgatagccaaagcttgatgtccttggccagggctgatctccaaagcctcaggcccaagcagagtggcgggcaggccggggtcagttgggcctctgtccccaaccctgcagcctgcacccacccactcaggaagcccctgccctgccgtgagctctgtggtgctttgctacccacagctgctcagggacgctgcaccaccggctcccctccctggccccggaacgtcctgtctggcgggccctacatcacaggaggaaggggcctgaacccagggcctgggcaggtggcggtaccgacactgtggccttgtttcctgcctgcaggcttggcgggggctccgaggacgccaaggagatcatgcagcatcgcttctttgccggtatcgtgtggcagcacgtgtacgagaagaaggtgcggctgctccccgcatattcacgcgcacgcatgctccccacatatccacactcacgcatgcacgtggcacgctcgccagatttcccacacactcgccctcacctcaggagcctgctgcagtcctggtacaaggagggccttgctgcaccaacctcagcgcctggtgctcagaggctctggcactgccgggttccaccaggaaactggcctggtcctcatttcctcctcccctcggaggtgtgtcacactctgagtttcctcctcccctcggaggtgtgtcacactctgagtgccagccttggggttcccttccctgacgctgtgcagtgaaggctggctggtggtggaccaggggtgctgccccttggcctccacgagttcctcctgtttgacctcaatcccttctgccgcaaggagagcccagccctatttctggctgtgcagggacagggacagcacctacttttctggcacatgggggagtccgccctggagggaggcagctctttctgcatgagtcgccatcctgggtgctcatctttcagggaccctaggagccctggccatcaccccagctgatggggtctgccagctgggttcggaagcctgcactctgagatgctgggtgccctgtcaccaggtgtgcttctgccccgttcccagcctgcccctcccctgaatgcctgtcctaggctgtgtgcagctggtcgggctgggcagccctgggacccagctgggcacctgttctcccattaacacagggtgccctggtcctggtccccgttcctgccttgaggcctgccaccctcctgccctgccctccaagggtatggggggcctgggcagtgctcaacctctgcccagccttgaccagagaccttgctaattgacaatggacaatgctggtgcccagcccagactctggggtggggcagtgcttgagggggtccttgactgtgggacctgaggggctctctggcagctcctcacgtgtgcacatcaccttatagtcacccttcatcctgggtcattgagagtcctgtctgcagccagatgccagcaggctgtggtcctgtagtccctgagccatggaggcagggtgggctcatcctgtgcaccttgttccacagtctccctctttcccaatttacaagaagaccaataagaaaaataagaaaacaagaaagaaaaaggaaaaataaagttatcacctcctggtagcagggagggtctctcagagctgggctgcactacctcctgtcgcctgctggggctgctgtgagggcagctttgcgtctcagctgttgagggttgtctccgtgctcctgcacccctcatgtccctccctcccagagctgcctctgtggggggctggtggcttgctgctctctgacatcagtcctgcctggagaccccttggagatccaggtgctttgaaggtcttgagcacacttgagggtgtgctgggagtggggagcgaagctcatgactgtcccgtctgcccacctctgcagctcagcccacccttcaagccccaggtcacgtcggagactgacaccaggtattttgatgaggagttcacggcccagatgatcaccatcacaccacctgaccaaggtgaggggccactgcctgcccccgcccactcccttttctctccacactcagagaggcctgcagtgttcagcttttttggcttcagatgttttaaaatctaaatatttaaaaaggttccttttggagagtgccaatgatcagggtgggaggcagtgctctgagggcccaggtccctgtgtcaatctgtggggccctgtctcagtttcctggcagtatggcagcgtgctggccgtgctttaagaggttggcttcctactggagctgtgggtgggtggaggtggcagggaggtggggcaccggggtctgagctgtctacacccacagatgacagcatggagtgtgtggacagcgagcgcaggccccacttcccccagttctcctactcggccagcggcacggcctgaggcggcggtggactgcgctggacgatagcttggagggatggagaggcggcctcgtgccatgatctgtatttaatggtttttatttctcgggtgcatttgagagaagccacgctgtcctctcgagcccagatggaaagacgtttttgtgctgtgggcagcaccctcccccgcagcggggtagggaagaaaactatcctgcgggttttaatttatttcatccagtttgttctccgggtgtggcctcagccctcagaacaatccgattcacgtagggaaatgttaaggacttctgcagctatgcgcaatgtggcattggggggccgggcaggtcctgcccatgtgtcccctcactctgtcagccagccgccctgggctgtctgtcaccagctatctgtcatctctctggggccctgggcctcagttcaacctggtggcaccagatgcaacctcactatggtatgctggccagcaccctctcctgggggtggcaggcacacagcagccccccagcactaaggccgtgtctctgaggacgtcatcggaggctgggcccctgggatgggaccagggatgggggatgggccagggtttacccagtgggacagaggagcaaggtttaaatttgttattgtgtattatgttgttcaaatgcattttgggggtttttaatctttgtgacaggaaagccctcccccttccccttctgtgtcacagttcttggtgactgtcccaccgggagcctccccctcagatgatctctccacggtagcacttgaccttttcgacgcttaacctttccgctgtcgccccaggccctccctgactccctgtgggggtggccatccctgggcccctccacgcctcctggccagacgctgccgctgccgctgcaccacggcgtttttttacaacattcaactttagtatttttactattataatataatatggaaccttccctccaaattcttcaataaaagttgcttttcaaatttttggctcactttgctgggtggaagagtgggtggccagggagggagtggggagtcctgggagggaagcagcatcctcagagcagctggtcctccccagctcctcctggtgggcaccgccaccccaacaggtttggggacaggctgtgtggtgggccgaggcgggagtatacaggcctgttcccaggggcagcctcccatggaaggtgttccacccccatctccagaggcctggcctgaggggagatgggaggccctggctggccctgcccccgttgggatccacctcttcttcccttgaccccacccagcttcaccccagccatgaaggagaccattggaccacgtggccatctgccccccagccccaggtgctgttcccctgggtagggcagtgaatgagacagaccaccaggaaggacagatagggcagggcccagagttggggccaaggtcatggcctgggccacggtggaagtaaggctgggaggcctgagtggcctgttcgaagctggacagagcgggaggaggggctgcaggcggtgggaggaggggctgcagggggcgggaggggacaggctggggcccaggttaccccagagcactacatcgagctctgagccggaacagcctgcagaatgtgccggtgctgccacctggtggacgcctgccggaaccgcgccctgagccaggagaggagtccactgccgagcaactgacagcgggttggcgaccaggttccgggtggttgggtgaccagcacgagccaggggcctggagcttcagcttcctcatctctcaaatggactccccgtaggtgtggatggttgcagagtcaggcccctggcgatggcaattggcccctctctaaggcattcccaggggtgcgtggctgccctcacttccactggagggggtgccccatagggagcacaggctggcgaggatgttctgggtctgtgggagccaagaacagccacatctggagcagcccgaagctctcctctgggtgatcccttattgcttcagttctaacaggccgcaaaactgataccgcttttcgggaaatacacgaaacatgacacagtaaatgatgttccgagggtgagaggcatctggatttcagatctatcaataatgtgactcttagaaaccaaaaaatacagcaatgcccttccaatatccacaaactttgagcaaagcattgctgaaagtaaccaaggtatggaaatggtcaggcagacgcagcatctcccagacagcccggctgagaagcatgggctgcttctcccagcacggccccctctgacaatataggattgccttagggccatttcttaccttttttatggtagagatagggtctcgctatgttgttcaggccggtcttgaactccgggcctcaagtgatcctcctgccttgtcctcccaaaacgttgggattataaggtgtgagccaccacacctggcctcttagggatagttctatagtccagagagagagaggcttcaacgtcattggcattaatacagacatgaccctgtgttatgtccccgttacaagtggctgaggacctaacaaaatgaacgcagaaatggagaccctctgagaatttcccgaccctcctagcagccccagacagaaccatctacagcaggaggcagcatcccaggagtggggtggagggtgtcagtgaggggtgagatgtgcaaggagatgcacatctcagagaggaaactccaggaggtgcaggtgcccttgcaaggggcagtccagtcctggccagcgaggccagagcgggtggagagggccaggatcctgcagccccaacagggcctgccgaacagcgagggctgtctggagaggttgtaacaggaatacgccaaccaagaggaagctctccttcctgtgtcagaggtaccccgaaggaaacaatgcataaagtgtccatttccaagacaaagtgcctaaaatcagcttaggtcagcaaactacggaagcaacaggatatactaggcccctgcttggatagccaacgcctgtttgtcaccgccagcccccgtcccttagtttccctcacctgaaccaaagtttagtctaaaatgaaagtttactagcctccaaaatagctcgctttgtctgttcgtatcagcctgcccagctacttaggtcagaagtcaaatatttgaagagcccctgagctaactaggattgcaatgcattgtgggctgcaacagaatgcagcaagacaactctaaagaaaacacctaaagcccctgcccaacaaccaataggtgacgtccaggaaggttgtgaccccatagtactcagcctatgaagaaccgggggagggacctgcacactaggggataaattgcttgttgaaactgtgctgggtgtgccagctcatcaggcacccaatcttgcaagactatcattaaaagtctcacttttgctgttctccggtctctgaggtctctgagtccattcttcgggtgtggatgggtgagtttgtttctcacatgcccacatcatgctctttccagcacaaggccggcctggaagggaggaagataataaaagtgacttgagcacttagacctcccatgtttcagcaggtgtgggtaactgaaggctctgcaggtctctgggtctgggggcctcaatgttgtagacgaggtcccaggagctgagagtgctactggggcatgtcaggataagggctaggcctgccttcccagaagatgtcacttccagtgaatgtctgttcaaaggctgactttatcatacaacagataattatttcatccttttgcttctagcaagtctgggaaagagctacagaaggggctgacagcatgtagggtttttgttgttatttaaaaaaaaaagtctaacaatcattgcccattaattaaggtgtctagaccatttacatttaatgcaactattgatatggttgagcttaaatgtactatcttgctctttttctatacattccatttgttctttgttcctcctttcctttcctttttttgtattaaataagtattgccgattgtctcattttatctcctttattggcttattttttggattttaccagttttcccactgatgttctttttctattccagtatacacatacaatccaggatactgtgttgcatttagaataaatatattttgaataaatgaatgaatgtagctccccagccctctggggatttcatatacgtgagatcatgcagtgtttgtctttttgtgtctggcttatttcactcagtcatagtatctttaaggttcatttgtgttgtagcatgtcagaattttatttctttttaaggctgaatactattttattgcatgtatagaccacattttgtttattcatttgtcctgtgatgaacatttgggttgtttccatcttttggctactggggataatgctgctacaaacttgtgtacaaatacctgttcacgtccctgctgtcaattattttgtgtctgtacccagaagtggaattgctggatcaaacagtaattctgtgttcagttttaattttcctttcatttttttgagacatagtctcactatgttgcccaggctggtctcaaactcctgggctcaagtgatcctcctgtctcagccttccaaaccactaggattacaggcattagccactgtgccaggcttatgtttagtgttttgaggaactgcctactgttttctgcactggctgcaccatttcacattcccaccggcagtgcacaaatgttccaatttctccatatcctccccgacacttgttttattttcaaatagtagctatcttgatgggtgtgaggtggtatctcattgtggttttgatttgcatttccctgataatcagtgatgttgagcatcttttcatgtgtgtgctgtttttatatattctttggacaaatgtttactcaagtcctttgcccatttttggattttttttttaattgctgcgtgttaggagttctttatgtatagatggtccctgacttacaatggttaaacttataatttttcaactttacaatgttgcaaaagctatacacattcagtatgctccttaacaatattttcttttttttttttttttttttttttgagacggagtctcgctctgtcacccaggctggagtgcagtggcgcgatctcggctcactgcaagctctgcctcctgggttcatgccattctcctgcctcagcctcccgagtagctgggactacaggagcctgccaacacgcccggctaattttttgtatttttagtagacacggggtttcactgtgttagccaggatggtctctatctcctgacctcgtgatccacccgcctcggcctcccaaagtgctgggattacaggcatgagccactgcgcctggcccttaacaatattttcaactcgtgatggatttatctggatgtaacccattgtaagctgaggagcatctgtatagacaattaaaaaaaatttttttttttctttgagacagagtctcgctctgtcacccaggctggagtgcaatggcgcgatctaggctcactgcaacctctgcctccgaggttcaagcgattctcctgcctcagcctcctgagtagctgggattacaggcgcccaccaccatgcccagctaatttttttttttttgtatttttagtacagacagggttttaccatgttggtcaggctggtctcgaactcctgacctcaggtgatctgccagcatcagcctcccaaagtgctgggattacaggcatgagccaccacgcctggccttttttaaaattaagatagtcttgctctgttgcccaggctggagtgcaatggcgcgatctcgggtcactgcaacctctgcctcctgggttcaagggattctcctgcctcagcctcctcaatagctgggattacaggcgtgcgccgccaccacacctggctaatttttgtatttttagtagagatgggtttttgccatgttggccaaaccttgaactcctgacctcaggtgattcgcctgcctcagcctcccaaagtgttggaattacaggtgtgaaccactgcagctggcctaggcaattgtcttttaaagagattatatatatacatatttaaagacagggtcagctgggcgcagtggctcatgcctgtaatcccagcactttgggaggccgaggtgggcagatcacgaggtcaggagattgagaccatcctggctaacacggtgaaacctcgtctctactaaaaatacaaaaaattcaccgagcgtggtggcgggcacctgtagtcccagctactcaggaggctgaggcaggagaatggcatgaacccgggaggcagagcttgcagtgagccgagatcaggccactgcactccaacctgggtgacagagcaagacactgtcaaaaaaaaaaataataaataaaataaaataaagacagggtcttgccatgttgcccaggctggctttgaacccctatcaagtgattctcccagcttaatctcctgagtagctgggacaacaggcacttttaaaaatcagaaaaaaccctgccttttgtgtcctcccaaacagtgaccatttcaggtgctcgtcatatctttgtgtacaagcagtttccatctggtgtcattttccttctgccagaaaaacttcttttgacaatttttgtaaatcttccagctttgtatgtctgaaaagtctttatttcaccttcacttttgaaagatattttcactgggtatagaattccaggttgacattcttttctttcaaaactaaatttggataaatgtttattcaagctgggcttgggattacaaatcccagcactttgggaggctgaggtaggcagatcacctgaggttgggagtttgagaccagcctaaccgacatagagaaaccccgtctccactaaaaatacaaaattaggcaggcatggaggcgcatgcctgaaatcccagctatttgggaggccgaggcaggcgaattgcttgaaccagggaggcggaggttgtggtgaggcgagatcgtgccaccgcactccagcctgggcaacaagagcgaaactccatctcaaaaaaataaataaataagtttattcaagttctttgcccaacccacaggtgttgttcactgtctgcttgcagtttctagtgagaagtcttgctgccattctttgttcctgtaaacacaaagtgtcttttttctctggctgcttttttttatttgtcactggtttggaggaatttcatgatgatgtgcttcatgtaattttctccatgtttcttttggggtttgttgagcttcctggatctgtggctttatgtttccaccaaattaggaaattttacagtcattattttatttatttatttatttagagatggagtttcgctcttgttgcccaggctggagtgcaatggcacaatctcagcttgctgcaacctccgcctcccgggttcaagcgattctcctgcctcagcctcccaagtagctgggattataagcacctgccaccacgcctggctaatttttgcatttttagtagagacagggtttcaccatgttggccaggctggtctcaaactcctgacctctggtgatccgccagcatcagcttcccaaagtgttgagattacaggcgtgagccaccacgcccggcctgccgttattttttccaaaagttgtctccaccctgctatgcccctcgtccatgggtctccagttaaaggcacagtaggctgcttgaagtggtcccacaactcagaggggctctgccattttcctcattttttttctgttcccttttggatagcttatattgcaatggcttcaagtccactaattttttgctctgcaatgtctattttggttttaatctcatcagtgtattttccatctcagacattgtatttttgtctctggaaattgtttgggccatttttatgtctttcattccttttcttaacatgctcctgttttcgtctatccttcttaataatggccattctgatgtccctgtctacttagtagacggaattattctaccaccttgtgtcatttctgggtctgtttctacagactaacttttcttctcattgtgtggtatagttcctgcttctttgcatgtttgattgttttttttctttttttgagacggagtctcactctgtcgcccaggctagagtgcagtggtgagattgagatcttggcttacttacctccacctcctgggttcaagtgattctcctgcctcggccttccgagtagctgggattacaggcacatgccaccgtgcctggcttatttttgtatttttagagacggggtttcaccatgttggccaggctgttctcaaactcctagcctcaagtgatccacccgccttgacctcccacagtgcttggattacaggcgtgagcctctgacacccggcctcgtttgttctaaaaaaaataagtaaataaatatgttttcccccttacttttgagttttgttctggatgctattaaagcacttgcaaccgtttggtctttttgaggcttgacttaaaggtgttaggaaggcacagagcagtctctagtctagggctaatctagcctgaatatggcatcaatatccttttgagtcctctaccctgttctccatgaatgatgtttccccacacttagtgctgggaatgtgacttgcttcccgctttcttccaatggctctttccccagcctcaggcagtttcctcacacacaggagccatcagtcctcagcaggagccttaggggaacactgaggcaatttctactccagtgttgcagctgccctgggctcttggtgtttgttccctctctcaggcgttactatcctgcaatggctgctgtccgatgtctctctctctatatagtcatctatgggccagtttttgttgctccaccacagctggaagaccaacaatatttactgcaaacatatatgccaggtactgctctaggcaaagtcccacccctcacggaagcgacacctcagttagtagagttagaataagtacatttgcatatttacttaaatatgcattacgtccagtggtaaagttaggtagggcgagagggagcgtgatggaggggttgtcctacacattagggcactgggatgcttctctgagctgaatccgggggagccctatggatgtccagaggaagagctccccaggcagaaggagcgaggggggtgcaggggaaacatgctgagcattctcagaacagcaggaaggcctggctggggcagagcaagccttgggataggggaggaggggtgaagccagaggctgtggggccacagacttttacttttaaggacatgtttagccactggagtgttgggacaggggagtgacagatctggctgctgtataaggacagactgccaggtgcagggcagaagcagggagcctggaaggcgctatgtagtgaccctataggggaaggaggcaggctggctggagtagtgtggtcctgtggggcagggatgtggccagaggatgtgaagggaagagccgacaggcccgagggggcagcgacaggagtaacagaaatgagggcttgggtggcagtctgttgtggaaacctggaaggagtcagcacgtggctgaccgtggccacttgctcccgatgctcgcagcaggcggtcaaggccgtcctcattgcaggaagcccccagccagtcctctgcaatccccttctaagttgccccctggaattttaccatgctgaccacctctctgagcgccccctctacccgtgacacgggagtggtatatcctcggccccagggcagcaaatcccactctgggcctggctccaacccaccacttgggcaccactgacttttctctaagaatcagcataatttgctcttctaacagcttcccaggaacagcaaaggctcttctcaactgtccccagcacatgctcccacccaccctctgccccaaacaacctttactctagtccagagcttctcagaggggctgtggctcaactgctcactcatccctggaggggctgggacccgcctcagtcgacttgtgtggggaccagcactcaagcagcctgccctcttctgtcctccaggccaccccgcctcctctcctgtcaactcctcttccttcaaggccccacacaagctacaccgactccagagggagcacagctgggcccatctcccctgctagagcaaagctcctggagggcaggggcctatcaatcacacggggcctgaccatacaggcaccaaaaaagtaaagtggacaccaagatgtgatggatcaggcgtgcatgacagtggcgtctggggatggggcgcgagtatcacctctctccgtgaaggtctagtacactggttgtgtaccctggagccagacctgggtcctttctccccatttaccagctgggcgagctggggaggagcgtgctctgggctgagccttcccacctgtagcagggggcgagtaaggggcctcacacaatgcacagtggggtctctaggagctggcgggtagacagcaggtgcagcaggccccgcccactgactgctcctttggccctcccaggtggagggtcacaaactccaccctcagaagtgctgacagacaagagtcctcttgtgcaaatataaagaggtttattcattctgtcattaggatacaaaatagaacatgtaaaaggcacccctcccgtcgaccccacagttcagtgtgaacaccgagcgctcgtccagggaaggctgccatgcacggcgtggctcccggtgaaggcagccggcttgagccagcctcaggtctcgaacatggcacagctggtgcacagcactttctcgtacatgtcactgcagctgcgacagcgtcagggaggggagagaaaagctgctgtcaggggctgaattgtgtccaccaccccccaccattcaaacgtcaaagtcctaacccagaacacctcaggacatgaccttatctggagacaggatcactgcgggcatcatcagtctagatgacggcactgacatgggggccctaaggcaacacgaccagcgtcctaaaaagactacgtgaagagaaggacacagagaaggaagacgacatgaagatacagggagggggcagctgtctacagggaacaccaaagataaccagcaga

SEQ ID NO: 1560 - DNA, 2915 bp, Homo sapiens
tctggggagcagggaggagccctgtgccctgtcccaggatccatgggtaggaacaccatggacagggagagcaaacggggccatctgtcaccaggggcttagggaaggccgagccagcctgggtcaaagaagtcaaaggggctgcctggaggaggcagcctgtcagctggtgcatcagaggctgtggccaggccagctgggctcggggagcgccagcctgagaggagcgcgtgagcgtcgcgggagcctcgggcaccatgagcgacgtggctattgtgaaggagggttggctgcacaaacgaggggagtacatcaagacctggcggccacgctacttcctcctcaagaatgatggcaccttcattggctacaaggagcggccgcaggatgtggaccaacgtgaggctcccctcaacaacttctctgtggcgcagtgccagctgatgaagacggagcggccccggcccaacaccttcatcatccgctgcctgcagtggaccactgtcatcgaacgcaccttccatgtggagactcctgaggagcgggaggagtggacaaccgccatccagactgtggctgacggcctcaagaagcaggaggaggaggagatggacttccggtcgggctcacccagtgacaactcaggggctgaagagatggaggtgtccctggccaagcccaagcaccgcgtgaccatgaacgagtttgagtacctgaagctgctgggcaagggcactttcggcaaggtgatcctggtgaaggagaaggccacaggccgctactacgccatgaagatcctcaagaaggaagtcatcgtggccaaggacgaggtggcccacacactcaccgagaaccgcgtcctgcagaactccaggcaccccttcctcacagccctgaagtactctttccagacccacgaccgcctctgctttgtcatggagtacgccaacgggggcgagctgttcttccacctgtcccgggagcgtgtgttctccgaggaccgggcccgcttctatggcgctgagattgtgtcagccctggactacctgcactcggagaagaacgtggtgtaccgggacctcaagctggagaacctcatgctggacaaggacgggcacattaagatcacagacttcgggctgtgcaaggaggggatcaaggacggtgccaccatgaagaccttttgcggcacacctgagtacctggcccccgaggtgctggaggacaatgactacggccgtgcagtggactggtgggggctgggcgtggtcatgtacgagatgatgtgcggtcgcctgcccttctacaaccaggaccatgagaagctttttgagctcatcctcatggaggagatccgcttcccgcgcacgcttggtcccgaggccaagtccttgctttcagggctgctcaagaaggaccccaagcagaggcttggcgggggctccgaggacgccaaggagatcatgcagcatcgcttctttgccggtatcgtgtggcagcacgtgtacgagaagaagctcagcccacccttcaagccccaggtcacgtcggagactgacaccaggtattttgatgaggagttcacggcccagatgatcaccatcacaccacctgaccaagatgacagcatggagtgtgtggacagcgagcgcaggccccacttcccccagttctcctactcggccagcggcacggcctgaggcggcggtggactgcgctggacgatagcttggagggatggagaggcggcctcgtgccatgatctgtatttaatggtttttatttctcgggtgcatttgagagaagccacgctgtcctctcgagcccagatggaaagacgtttttgtgctgtgggcagcaccctcccccgcagcggggtagggaagaaaactatcctgcgggttttaatttatttcatccagtttgttctccgggtgtggcctcagccctcagaacaatccgattcacgtagggaaatgttaaggacttctgcagctatgcgcaatgtggcattggggggccgggcaggtcctgcccatgtgtcccctcactctgtcagccagccgccctgggctgtctgtcaccagctatctgtcatctctctggggccctgggcctcagttcaacctggtggcaccagatgcaacctcactatggtatgctggccagcaccctctcctgggggtggcaggcacacagcagccccccagcactaaggccgtgtctctgaggacgtcatcggaggctgggcccctgggatgggaccagggatgggggatgggccagggtttacccagtgggacagaggagcaaggtttaaatttgttattgtgtattatgttgttcaaatgcattttgggggtttttaatctttgtgacaggaaagccctcccccttccccttctgtgtcacagttcttggtgactgtcccaccgggagcctccccctcagatgatctctccacggtagcacttgaccttttcgacgcttaacctttccgctgtcgccccaggccctccctgactccctgtgggggtggccatccctgggcccctccacgcctcctggccagacgctgccgctgccgctgcaccacggcgtttttttacaacattcaactttagtatttttactattataatataatatggaaccttccctccaaattcttcaataaaagttgcttttcaaatttttggctcactttgctgggtggaagagtgggtggccagggagggagtggggagtcctgggagggaagcagcatcctcagagcagctggtcctccccagctcctcctggtgggcaccgccaccccaacaggtttggggacaggctgtgtggtgggccgaggcgggagtatacaggcctgttcccaggggcagcctcccatggaaggtgttccacccccatct

SEQ ID NO: 1561 - protein, 478 aa, Homo sapiens
MSDVAIVKEGWLHKRGEYIKTWRPRYFLLKNDGTFIGYKERPQDVDQREAPLNNFSVAQCQLMKTERPRPNTFIIRCLQWTTVIERTFHVETPEEREEWTTAIQTVADGLKKQEEEEMDFRSGSPSDNSGAEEMEVSLAKPKHRVTMNEFEYLKLLGKGTFGKVILVKEKATGRYYAMKILKKEVIVAKDEVAHTLTENRVLQNSRHPFLTALKYSFQTHDRLCFVMEYANGGELFFHLSRERVFSEDRARFYGAEIVSALDYLHSEKNVVYRDLKLENLMLDKDGHIKITDFGLCKEGIKDGATMKTFCGTPEYLAPEVLEDNDYGRAVDWWGLGVVMYEMMCGRLPFYNQDHEKLFELILMEEIRFPRTLGPEAKSLLSGLLKKDPKQRLGGGSEDAKEIMQHRFFAGIVWQHVYEKKLSPPFKPQVTSETDTRYFDEEFTAQMITITPPDQDDSMECVDSRPHFPQFSYSASGTA

SEQ ID NO: 1562 - DNA, 2979 bp, Homo sapiens
agcggcgggcgccggaggccgcggcccggctaggcccgcgctcgcgcccggacgcggcggcccgtctggggagcagggaggagccctgtgccctgtcccaggatccatgggtaggaacaccatggacagggagagcaaacggggccatctgtcaccaggggcttagggaaggccgagccagcctgggtcaaagaagtcaaaggggctgcctggaggaggcagcctgtcagctggtgcatcagaggctgtggccaggccagctgggctcggggagcgccagcctgagaggagcgcgtgagcgtcgcgggagcctcgggcaccatgagcgacgtggctattgtgaaggagggttggctgcacaaacgaggggagtacatcaagacctggcggccacgctacttcctcctcaagaatgatggcaccttcattggctacaaggagcggccgcaggatgtggaccaacgtgaggctcccctcaacaacttctctgtggcgcagtgccagctgatgaagacggagcggccccggcccaacaccttcatcatccgctgcctgcagtggaccactgtcatcgaacgcaccttccatgtggagactcctgaggagcgggaggagtggacaaccgccatccagactgtggctgacggcctcaagaagcaggaggaggaggagatggacttccggtcgggctcacccagtgacaactcaggggctgaagagatggaggtgtccctggccaagcccaagcaccgcgtgaccatgaacgagtttgagtacctgaagctgctgggcaagggcactttcggcaaggtgatcctggtgaaggagaaggccacaggccgctactacgccatgaagatcctcaagaaggaagtcatcgtggccaaggacgaggtggcccacacactcaccgagaaccgcgtcctgcagaactccaggcaccccttcctcacagccctgaagtactctttccagacccacgaccgcctctgctttgtcatggagtacgccaacgggggcgagctgttcttccacctgtcccgggagcgtgtgttctccgaggaccgggcccgcttctatggcgctgagattgtgtcagccctggactacctgcactcggagaagaacgtggtgtaccgggacctcaagctggagaacctcatgctggacaaggacgggcacattaagatcacagacttcgggctgtgcaaggaggggatcaaggacggtgccaccatgaagaccttttgcggcacacctgagtacctggcccccgaggtgctggaggacaatgactacggccgtgcagtggactggtgggggctgggcgtggtcatgtacgagatgatgtgcggtcgcctgcccttctacaaccaggaccatgagaagctttttgagctcatcctcatggaggagatccgcttcccgcgcacgcttggtcccgaggccaagtccttgctttcagggctgctcaagaaggaccccaagcagaggcttggcgggggctccgaggacgccaaggagatcatgcagcatcgcttctttgccggtatcgtgtggcagcacgtgtacgagaagaagctcagcccacccttcaagccccaggtcacgtcggagactgacaccaggtattttgatgaggagttcacggcccagatgatcaccatcacaccacctgaccaagatgacagcatggagtgtgtggacagcgagcgcaggccccacttcccccagttctcctactcggccagcggcacggcctgaggcggcggtggactgcgctggacgatagcttggagggatggagaggcggcctcgtgccatgatctgtatttaatggtttttatttctcgggtgcatttgagagaagccacgctgtcctctcgagcccagatggaaagacgtttttgtgctgtgggcagcaccctcccccgcagcggggtagggaagaaaactatcctgcgggttttaatttatttcatccagtttgttctccgggtgtggcctcagccctcagaacaatccgattcacgtagggaaatgttaaggacttctgcagctatgcgcaatgtggcattggggggccgggcaggtcctgcccatgtgtcccctcactctgtcagccagccgccctgggctgtctgtcaccagctatctgtcatctctctggggccctgggcctcagttcaacctggtggcaccagatgcaacctcactatggtatgctggccagcaccctctcctgggggtggcaggcacacagcagccccccagcactaaggccgtgtctctgaggacgtcatcggaggctgggcccctgggatgggaccagggatgggggatgggccagggtttacccagtgggacagaggagcaaggtttaaatttgttattgtgtattatgttgttcaaatgcattttgggggtttttaatctttgtgacaggaaagccctcccccttccccttctgtgtcacagttcttggtgactgtcccaccgggagcctccccctcagatgatctctccacggtagcacttgaccttttcgacgcttaacctttccgctgtcgccccaggccctccctgactccctgtgggggtggccatccctgggcccctccacgcctcctggccagacgctgccgctgccgctgcaccacggcgtttttttacaacattcaactttagtatttttactattataatataatatggaaccttccctccaaattcttcaataaaagttgcttttcaaatttttggctcactttgctgggtggaagagtgggtggccagggagggagtggggagtcctgggagggaagcagcatcctcagagcagctggtcctccccagctcctcctggtgggcaccgccaccccaacaggtttggggacaggctgtgtggtgggccgaggcgggagtatacaggcctgttcccaggggcagcctcccatggaaggtgttccacccccatct

SEQ ID NO: 1563 - protein, 478 aa, Homo sapiens; identical to SEQ ID NO: 1561

SEQ ID NO: 1564 - DNA, 2627 bp, Homo sapiens
agcggcgggcgccggaggccgcggcccggctaggcccgcgctcgcgcccggacgcggcggcccgtctggggagcagggaggagccctgtgccctgtcccaggatccatgggtaggaacaccatggacagggagagcaaacggggccatctgtcaccaggggcttagggaaggccgagccagcctgggtcaaagaagtcaaaggggctgcctggaggaggcagcctgtcagctggtgcatcagaggctgtggccaggccagctgggctcggggagcgccagcctgagaggagcgcgtgagcgtcgcgggagcctcgggcaccatgagcgacgtggctattgtgaaggagggttggctgcacaaacgaggggagtacatcaagacctggcggccacgctacttcctcctcaagaatgatggcaccttcattggctacaaggagcggccgcaggatgtggaccaacgtgaggctcccctcaacaacttctctgtggcgcagtgccagctgatgaagacggagcggccccggcccaacaccttcatcatccgctgcctgcagtggaccactgtcatcgaacgcaccttccatgtggagactcctgaggagcgggaggagtggacaaccgccatccagactgtggctgacggcctcaagaagcaggaggaggaggagatggacttccggtcgggctcacccagtgacaactcaggggctgaagagatggaggtgtccctggccaagcccaagcaccgcgtgaccatgaacgagtttgagtacctgaagctgctgggcaagggcactttcggcaaggtgatcctggtgaaggagaaggccacaggccgctactacgccatgaagatcctcaagaaggaagtcatcgtggccaaggacgaggtggcccacacactcaccgagaaccgcgtcctgcagaactccaggcaccccttcctcacagccctgaagtactctttccagacccacgaccgcctctgctttgtcatggagtacgccaacgggggcgagctgttcttccacctgtcccgggagcgtgtgttctccgaggaccgggcccgcttctatggcgctgagattgtgtcagccctggactacctgcactcggagaagaacgtggtgtaccgggacctcaagctggagaacctcatgctggacaaggacgggcacattaagatcacagacttcgggctgtgcaaggaggggatcaaggacggtgccaccatgaagaccttttgcggcacacctgagtacctggcccccgaggtgctggaggacaatgactacggccgtgcagtggactggtgggggctgggcgtggtcatgtacgagatgatgtgcggtcgcctgcccttctacaaccaggaccatgagaagctttttgagctcatcctcatggaggagatccgcttcccgcgcacgcttggtcccgaggccaagtccttgctttcagggctgctcaagaaggaccccaagcagaggcttggcgggggctccgaggacgccaaggagatcatgcagcatcgcttctttgccggtatcgtgtggcagcacgtgtacgagaagaagctcagcccacccttcaagccccaggtcacgtcggagactgacaccaggtattttgatgaggagttcacggcccagatgatcaccatcacaccacctgaccaagatgacagcatggagtgtgtggacagcgagcgcaggccccacttcccccagttctcctactcggccagcggcacggcctgaggcggcggtggactgcgctggacgatagcttggagggatggagaggcggcctcgtgccatgatctgtatttaatggtttttatttctcgggtgcatttgagagaagccacgctgtcctctcgagcccagatggaaagacgtttttgtgctgtgggcagcaccctcccccgcagcggggtagggcagccctcagaacaatccgattcacgtagggaaatgttaaggacttctgcagctatgcgcaatgtggcattggggggccgggcaggtcctgcccatgtgtcccctcactctgtcagccagccgccctgggctgtctgtcaccagctatctgtcatctctctggggccctgggcctcagttcaacctggtggcaccagatgcaacctcactatggtatgctggccagcaccctctcctgggggtggcaggcacacagcagccccccagcactaaggccgtgtctctgaggacgtcatcggaggctgggcccctgggcccctccacgcctcctggccagacgctgccgctgccgctgcaccacggcgtttttttacaacattcaactttagtatttttactattataatataatatggaaccttccctccaaattcttcaataaaagttgcttttcaaatttttggctcactttgctgggtggaagagtgggtggccagggagggagtggggagtcctgggagggaagcagcatcctcagagcagctggtcctccccagctcctcctggtgggcaccgccaccccaacaggtttggggacaggctgtgtggtgggccgaggcgggagtatacaggcctgttcccaggggcagcctcccatggaaggtgttccacccccatct

SEQ ID NO: 1565 - protein, 478 aa, Homo sapiens; identical to SEQ ID NO: 1561
